United States Patent Application Publication US 2019/0343942 A1 - sequence listing, part 2

SEQ ID NO: 2400 - RNA, 309 nt, Artificial Sequence
  AAF88037 variant
augagcgccagagugaggucccggucucgcggccgaggggacggacaggaggcucccgaugucguugcauucguggccccuggugaaucacaacaggaggaaccaccgaccgacaaccaggauaucgagcccggccaggaacgugaggggacaccuccaauugaggaaagaaagguagagggagacugccaagaaauggaucuggagaaaacuaggagugagcggggcgacgguagcgaugugaaggagaaaacgcccccuaauccaaagcacgcgaaaaccaaggaagcuggggacggacagcccuga

SEQ ID NO: 2401 - RNA, 1209 nt, Artificial Sequence
  AAA60003 variant
augcagaugagccccgcccugaccugccucgugcuuggccuggcuuuggucuucggggagggauccgcaguucaccauccuccaucuuacguggcccacuuagcgucagacuuugguguaagaguguuccaacaggucgcucaggccaguaaggauaggaacgugguuuuuagcccguauggcguggcauccguccuggccaugcuacagcucacaacugggggagaaacgcaacagcagauccaggcugcaaugggcuucaaaauugacgauaaggguauggcccccgcucugcggcaucuuuacaaagagcugauggggccuuggaauaaggacgaaauaucuaccacagaugccaucuuugugcaacgcgacuugaaacucguacagggauucaugccacacuuuuuccgacuguuucguucgacuguuaaacagguggauuucucagaggucgaaagagcgagguuuauuaucaacgacugggugaagacccauacaaagggcaugauuagcaaucugcucggcaagggggcaguggaucaguuaacccggcugguccuuguuaacgccuuguauuucaauggacaauggaaaacucccuuuccugacaguuccacacaccgcagacuguuccacaagucugaugguagcaccguguccguaccaaugauggcucagacgaacaaauucaauuacacugaguuuaccacacccgacggccauuauuacgauauccuagagcucccuuaucacggggacacucugucaauguucauagccgcaccauacgaaaaggaggugccgcuuagugcucugaccaacaucuugagcgcccagcucauuucucauuggaagggaaauaugacaaggcugccccgguuacugguccucccuaaauuuucccuugaaaccgagguggaccugcgcaagccauuggagaaccuaggcaugacggauauguuccgacaauuucaggcggacuucacuucacugagcgaucaggaaccccuccacguugcccaggcacugcaaaaagugaagaucgaggucaaugaaagugguacaguggcuucuuccagcaccgccguaauuguuucggcuagaauggccccugaggaaaucauaauggacaggccauuucuuuucgugguccggcacaaccccacugggacagugcuguuuaugggacaggucauggagccguga

SEQ ID NO: 2402 - RNA, 1248 nt, Artificial Sequence
  AAA36797 variant
auggaggaccugugcguggccaacacccucuucgcucuuaaucuguuuaagcacuuggcaaaagccagccccacacagaacuuauuccuguccccuuggucuaucucaaguacuauggcgauggucuacaugggcagcagaggguccacggaagaucaaauggcuaagguucuacaguuuaaugaggugggagccaacgcaguaaccccaaugacaccggaaaauuucacuucuugugguuuuaugcagcagauucaaaaaggcucguaucccgacgccauacuccaggcucaggcagccgauaagauccauagcucauucaggagucuguccucugcuauuaacgccagcaccgggaauuaccuucuggaguccgugaacaaauuguuuggagaaaagucagcgaguuuccgggaggaguauauccgccucugccagaaguacuauagcucugaaccucaagcagucgacuuucuggagugugccgaagaggcucguaaaaagauuaauuccugggugaaaacacagaccaagggcaaaaucccaaaccugcuccccgaggguucaguugauggggacacucgaaugguguuagucaaugccguguacuucaagggaaaguggaaaacaccuuuugaaaagaaacugaacggccuuuauccauucagaguaaauagcgcacagaggacccccguucagaugauguacuugcgggagaagcugaacauaggcuacaucgaagaucuaaaagcucaaauucucgagcugccuuaugccggggacgugaguauguuucuucuguugccagaugaaaucgcggacgucucuacgggacucgagcuguuagaguccgaaauuacuuacgauaagcugaauaaauggaccagcaaggacaagauggccgaggaugaaguggagguguauaucccgcaguucaaacucgaggaacacuacgagcuucgcucgauacugagaucuauggguauggaagacgcauucaacaagggcagggcuaacuuuuccgggaugucagagcggaaugacuuguuccuaagugaagucuuucaucaggccaugguugaugugaacgaggaaggaacagaggcugccgcaggcacuggugggguaaugaccggacgcacaggccacggcgggccccaauucguggccgaccauccuuuucuguuccucauuaugcacaaaaucaccaauugcauucuguuuuucggacgauuuagcuccccauga

SEQ ID NO: 2403 - RNA, 528 nt, Artificial Sequence
  AAA60020 variant
augcugcccccuauggcccucccaagcguguccuggaugcuucugucuugcuugauguuacugucacagguccaaggcgaggaaccgcagagagagcuacccagugcuaggauccgguguccuaaggggagcaaagcauacggaucccacugcuaugcccucuuccugucuccaaagucguggaccgacgcggaucuugcuugucagaaacgccccucagguaaccugguuagcguguugaguggcgccgaaggguccuuuguaucuagccucgugaaguccauuggaaauucauacaguuaugucuggauaggccugcaugacccuacacaggguacugagccaaacggggaaggaugggaguggucuagcuccgaugugaugaauuacuucgcaugggagcgaaaccccucaacgaucagcaguccuggccacugcgccucucugucccguagcaccgcuuuucucagauggaaagacuauaauuguaacguuagguuaccauacgugugcaaguucacagauuga

SEQ ID NO: 2404 - RNA, 528 nt, Artificial Sequence; identical to SEQ ID NO: 2403
  AAT11159 variant

SEQ ID NO: 2405 - RNA, 381 nt, Artificial Sequence
  AAH39863 variant
auggacaagagccugcuccuugagcugcccaucuuguuaugcuguuucagagcccuguccggcucucuaucaaugaggaacgaugcugugaaugaaauugucgcaguuaaaaacaauuuuccugugauagagaucguacagugccggaugugucaccuccaauucccaggggaaaagugcagucgcggacgagguauuuguaccgccacaacugaggaagcgugcauggugggccguauguuuaaaagagacgggaacccguggcugacguucaugggaugucuuaagaauugcgcugaugucaaaggcaucagguggagcguguaccugguuaacuuucgguguugccgcucccaugacuuguguaaugaggaucucuga

SEQ ID NO: 2406 - RNA, 1440 nt, Artificial Sequence
  CCDS42826.1 variant
augaccacacuggccggcgcugugcccagaaugaugaggccugggccaggacagaacuacccgcggagcgguuucccccucgaggucuccacuccucuuggccaagggcgcguuaaucagcugggaggcguguuuaucaacggucgaccauugcccaaucacauucgucauaagauaguagaaauggcacaccaugggaucagaccuugcgugauuucuaggcaguuacgggucucacacggaugcgugaguaaaauccugugccgcuaucaggagacgggcagcauuagaccaggcgccaucgggggauccaagcccaaacaaguuaccacaccugacguggaaaagaaaauagaggaauacaagagggagaacccagguauguucucuugggagauccgggauaagcuacucaaagacgcggucugugaucgcaauacugugccgucgguaucaagcauuagucgaauccugagauccaaguuuggcaaaggggaagaggaagaggcugaccuugagaggaaggaagccgaggaaucugagaaaaaggcaaagcauagcauugauggaauccuguccgaacgggccucagcuccccagagugacgagggcagcgauauagacucugagccugauuugccacucaaacguaagcagcgcagauccaggaccacauucaccgcagaacagcuggaggaacuggagcgggccuuugaacgaacucacuaucccgacauuuacacacgcgaggagcucgcucaaagagccaaauuaaccgaagcgaggguucaggugugguucucaaaccggcgcgcaagauggaggaagcaggccggugcuaaucagcugauggccuuuaaccaccuuaucccugggggauucccacccacggcaaugccgacuuugccuaccuaucaacugagcgagacaaguuaccagcccacuucuauuccacaggcugucuccgauccuagcucgaccgugcaucguccccaaccacuacccccuucuacagugcaccaguccaccaucccaucaaauccggacaguagcuccgccuauugccuccccucuacgcggcauggcuuuagcucauacacugauaguuucgucccuccauccggccccagcaacccuaugaauccaacaaucgggaacggacugucuccccagguuaugggucuucugaccaaucacggcggggugccgcaccagccucaaacugacuacgcguugucaccacucacaggaggccuggaacccaccacgaccguaagugccagcuguucccagcgauuagaccauaugaaaucucuggauucgcucccuacaagccaguccuauugucccccaacuuacucaaccacagguuauaguauggacccugugacuggguaccaguauggccaauacggacagucuaagcccuggaccuuuuga

SEQ ID NO: 2407 - RNA, 1176 nt, Artificial Sequence
  AAA58397 variant
auggaccuggagaagaacuaccccaccccuagaacaagcaggacuggccacgggggagugaaucagcucgguggcgucuucguuaacgggcggccacuuccggaugugguacgccaacgaaucguggaacuggcccaucagggaguccgucccugcgacauuuccagacaguugagggugucucacggcuguguuucaaaaauauuaggucgguauuacgagacggggaguaucaagccuggagugauuggcggcagcaaaccaaaggucgcuacccccaaagugguagaaaagaucgcagaguauaagcgccagaauccuacaauguuugccugggaaauuagagauaggcugcuagcggagcggguuugcgacaacgauacugugccauccgucucuucgaucaaucgcauaauccgaaccaaagugcaacagcccccuaaccagccagugccggcuucaagccauaguauugucuccacagggucuguuacccaggugagcuccguaucaacugacagugccggaagcucuuacuccaucucagguauucucggcaucacaagccccagugcagauaccaauaagagaaaaagggacgaggggauacaagaaucuccugugccaaacggacacucccugcccggccgggauuuccuucguaagcagaugcgcggugaccuguuuacgcagcagcaauuggagguccucgauagaguguucgaaaggcagcauuauagcgacauuuuuacuaccacagagccuaucaaaccagagcagacuaccgaauacucggccauggcuucucuggcagggggacuggaugacaugaaggccaaucucgcuucccccacaccggccgacauuggcucaaguguuccuggcccccaaagcuauccaaucgugaccgggcgggauuuagcguccacgacucugccuggauaucccccacacgugcccccugcaggucagggcucuuacagcgccccaacacuuaccgggauggucccgggaucagaguucaguggcucccccuacagccacccucaguacucuucauauaacgacaguuggcgauuuccaaaucccgguuugcuggggagcccuuacuauuacuccgcugccgcacgcggcgcugccccacccgcggccgcaacugcuuaugauagacauuga

SEQ ID NO: 2408 - RNA, 873 nt, Artificial Sequence
  AAF25807 variant
augagaaucuucgccguguuuauuuucaugaccuacuggcaccuccucaacgcuuuuacagucacuguucccaaggaccuuuaugugguagaguacggcagcaauaugacgauagaaugcaaauucccuguggagaagcagcuggauuuggcagccuuaaucgucuauugggaaauggaggacaaaaacauuauccaauuugugcauggggaagaggaucugaagguucagcacuccucuuacaggcagcgggcgcgccuacucaaagaccagcugucacuuggaaaugcugcccugcaaauuaccgaugugaaguugcaggacgccggugucuaucgauguaugaucaguuacggcggggcagauuauaagcguauaacagugaaaguaaacgcuccauacaauaagaucaaccagaggauucucguuguggacccggucacuagcgagcaugaacugaccugccaggcagagggauaccccaaagccgaagugaucuggacauccucugaucaccaagugcugucgggcaagaccacuacaaccaauucaaaaagagaggagaagcuguucaacgucacgagcacuuuacggauuaauaccacaacuaacgaaaucuuuuauuguaccuuccgcagacuggacccugaggaaaaucauacagcugagcuuguuauaccagaauugccccuggcccacccuccaaacgagaggacccaccuagugauucucggugcgauccugcuuugccuggggguagcauugacguuuauuuuccggcuccgcaagggacgaaugauggaugugaaaaaguguggcauccaggacacuaauaguaaaaagcaguccgauacacaucuggaggaaaccuga

SEQ ID NO: 2409 - RNA, 867 nt, Artificial Sequence
  AAH74740 variant
augcagaucccccaagccccuuggccaguggucugggcuguucugcagcucggcuggagaccggggugguuccuugacagccccgauaggccuuggaacccacccaccuuuuccccugcacuguuggugguaacagagggagacaaugccacuuucacgugcucuuuuucaaacaccagugagagcuucguguuaaauugguaccggauguccccaucuaaccagacagauaagcuggcggcuuuucccgaagaccgcucgcagccuggucaagauugucgauuccgugucacucagcuaccaaauggcagagacuuucacaugucagugguuagggcccggcgcaacgauagcgggaccuaucucugcggagcaauuagucuggccccgaaagcucagauaaaggaaucccuuagagcagagcugagggugacagaacggcgcgccgagguccccaccgcucauccuucuccaagcccccgaccugccggccaguuccaaacuuuggugguagguguugucgggggacuccugggcucccuggugcucuuagugugggugcuggcggucaucuguucaagagcagccaggggcacaauuggggcucggcguaccggacagccacuuaaagaggaccccagugccguuccgguguuuagcguagauuacggugaauuggacuuccaguggcgcgagaagacgccugaacccccagugccuugcguccccgagcagacugaguaugcaaccaucguguuuccaucuggcauggggacauccucacccgcuagaaggggaagcgccgauggcccucggagugcgcaaccacugcgaccggaagacggucacuguucuuggccccuauga

SEQ ID NO: 2410 - RNA, 1008 nt, Artificial Sequence
  AAC95296 variant
augggcagcgccucccccgggcugucuucagugaguccuagccaccuccuucugccaccggacaccgucuccagaacaggauuggagaaggcugcagccggugcgguuggcuuagaaaggcgggauuggucucccucgccuccagcuacucccgagcaggggcugucagccuucuaccuaagcuauuuugacaugcucuacccugaagauaguuccugggcagccaaagcuccaggagcaucuagccgcgaggaacccccugaggagccagaacaaugcccggugaucgacucccaggcccccgcuggcucacuggaucuuguaccuggugggcugacguuggaggaacauagucucgaacaggugcagagcauggucgugggagagguucugaaggacauugaaaccgccuguaaacugcucaacauaacagcggauccaauggacuggucucccuccaaugugcaaaagugguuacuguggacugagcaccaguaucgacuuccuccaaugggcaaagcauuccaggaauuggccggcaaggagcugugcgcuaugucagaggagcaguuucgucaaagaagcccccuagggggagauguccuccaugcccaccuggacaucuggaagagugcagcuuggaugaaagagaggaccucuccgggugccauucauuacugugcguccacaagcgaagagucguggaccgauucugaaguggacuccucaugcaguggccagccuauccaccuuuggcaguuccugaaggaguugcuccugaaaccccacagcuaugggcgguuuauucgcugguuaaacaaggaaaaaggaaucuucaagauagaggauuccgcccagguagcaagacuguggggcaucaggaagaaucggccagcuaugaacuacgacaaacucucucgcagcauucgacaauauuacaagaaagguaucauuagaaagccugacaucucacagaggcuuguuuaccaguuugugcaucccauauga

SEQ ID NO: 2411 - RNA, 2217 nt, Artificial Sequence
  AAA36429 variant
augcagcccagaugggcccaaggcgcuaccauguggcugggggugcuccuuacacuguuguuaugcagcucccuggagggacaggaaaacucuuucacuaucaauucagucgacaugaagagucuaccugauuggacgguucagaacgguaaaaaucucacccugcaguguuuugcagacgugagcacaacuucccacguaaagccacaacaucagaugcuuuucuacaaagaugacgugcuguuuuauaacauuucuucgaugaagucaaccgagagcuacuucauaccggaagucaggaucuaugauaguggcacauacaaaugcaccgugauuguuaauaacaaggagaagacuacagccgaauaucaguugcucguggaggggguccccuccccucgggugacccuggacaaaaaggaggcgauccagggaggcauuguacgcguuaauuguucugugccagaagagaaagcucccauccacuuuacgauagaaaagcuggagcucaacgagaaaauggucaaguuaaagcgagaaaagaauagccgugaucaaaacuucgugauccuggaguuuccuguggaggagcaggacagaguccuuuccuucaggugccaggcccggauuaucucagguauucauaugcagaccagugaaagcacuaagucugaguugguuacagugacugaguccuuuucaaccccaaaauuccacaucagccccacagggaugauaauggaaggagcacaacugcauauuaaguguaccauccagguaacgcaccuagcccaggaguuuccugaaauuaucauccaaaaagauaaggcuauuguggcacacaaucgccauggcaacaaagccgucuacagugugauggcuaugguugagcacucuggcaauuauacuugcaagguggaauccagcagaauaucgaaggucucuuccaucgugguaaacauuacagaacucuucucaaaaccagagcuggaaaguagcuuuacccaucuugaccagggggagaggcugaauuuguccuguucuaucccgggagcucccccugcgaacuucacuauacagaaggaagauacaauuguuagccagacccaagacuucacgaaaaucgcaucaaagagugauuccgguaccuacaucugcacagccggcauugacaaaguggucaaaaagagcaacacugugcagaucgucgugugugagaugcucucucagccacggauuucauacgacgcucaguuugaaguuauaaaagggcaaaccaucgaggugcgcugcgagaguauuagcggaacacugcccaucuccuaucaguuacugaagacuucuaaaguacucgaaaauucgaccaagaacagcaaugauccugccgucuucaaagacaacccaacagaggauguggaauaccaguguguugcagacaauugccacucccacgcuaagaugcuuucagaggugcugcgagucaaggugaucgcccccguagaugaggugcagauuaguauauugucuagcaaaguugucgaauccggcgaggacaucgugcuacaaugcgcggugaacgaagguucagggccgauuaccuauaaguuuuacagagagaaagaaggaaagccuuucuaucagaugacuagcaaugccacgcaggcauuuuggacaaaacagaaggcuucuaaggagcaagagggcgaauacuauuguaccgccuucaacagggcuaaucaugccuccagugucccccggagcaaaauccugacuguucgugugauucucgcaccauggaagaaaggccugaucgccgugguaauaaucggggucauuaucgcccuucugauuaucgcggcaaagugcuacuuuuugcgcaaagccaaggcuaaacagaugccuguggagaugucuagacccgccguuccacuccugaacuccaauaacgaaaagaugucagaucccaauauggaggcaaacagucacuacggacauaaugacgaugugaggaaccacgccaugaagccuauaaacgacaauaaagaaccauuaaacagcgauguccaguauaccgaggugcaaguuucguccgcugagucucauaaggaccuggguaaaaaggacacagaaaccguguacagcgagguacggaaagccgucccggaugcaguggaaucacgauauagucgcacugagggcucccuagacgggacauga

SEQ ID NO: 2412 - RNA, 2736 nt, Artificial Sequence
  AAG23134 variant
auggcccagcuguuccucccccuucuggcugcauugguguuagcccaagcgccugcugcccuggcagacguccuagagggcgauagcuccgaagacagagccuuuaggguucggaucgcuggggaugcaccacuccagggagugcuggguggcgcccuuaccauuccgugccacguacauuaccugcgacccccuccaucucgccgugcuguguuggggucacccagagucaaguggacauuccucaguaggggacgggaggccgaagugcugguugcgcgcggcgugagagucaaagugaacgaggcauauagguuucggguagcccugccugcuuacccagccagccucacugacguuuccuuagcacugucugaacuucgccccaaugauucggguauauaucgaugugaggugcagcacgggaucgacgauucaagcgacgcugucgaggugaaggugaaaggagucguuuucuuguacagagaaggcagugccagguaugcguuuuccuucucuggcgcccaggaggcaugcgcucggauuggggcccauaucgcuacgccugaacaacuguacgccgcauaucuaggagguuacgagcagugugaugccggcuggcucagcgaccagaccgugcguuacccaauucagacaccgcgcgaggcuugcuauggggauauggacggauuucccggcguaagaaacuacgguguggucgauccugacgaccuguaugauguguacuguuaugcggaagaccuuaauggggagcuguucuugggagauccacccgaaaagcucacucuggaggaagcaagggccuacugccaagagcggggcgcugagaucgccaccacaggccaguuauaugcagccugggacgggggacuggaucacuguuccccugguuggcucgcugacggcucaguucgauacccaauagugacccccagucagcgcugcgggggaggccuuccgggugucaaaacucuguuuuuguucccuaaccagacaggguuucccaauaagcauagcagauucaacguguacuguuuuagggauucugcccaaccauccgcaaucccugaagcgucaaaucccgcuagcaacccagccagugacggccuagaggcaauuguaaccguuacggaaacucuggaggaacuccagcugccccaggaggccaccgagucugaaucccggggagcuaucuauagcauuccuaucauggaggauggcgggggagguucgucuacaccagaagacccggccgaggcaccccgcacucuucuggaguucgaaacccaauccauggugccuccaacaggcuucucagaggaagaggggaaggcuuuggaagaggaggaaaaauacgaggaugaagaggaaaaggaggaggaagaggaagaggaagaggucgaggacgaagcccucugggcguggcccagugagcugagcuccccuggaccagaagccucuuuacccaccgagccggcugcacaggaagagagccugucacaggccccugcuagagccgugcuacagccaggcgcaaguccccucccugacggugaguccgaagcgagcaggcccccacguguccacgggccucccacggagacucugccaacaccgcgggaacgaaaucuugccucuccuucacccaguaccuugguggaggcuagagagguuggcgaagccacuggaggcccagagcugagcggggugcccaggggagaauccgaggaaacagguucuucggagggcgcaccuagccuccugccagcuacccgcgcccccgaggggacgcgggaacuugaggcaccuuccgaagauaacucaggaagaaccgccccggcuggcacaaguguacaagcgcagccaguccugcccacugacucugccagcaggggugggguggcaguugugccugcuuccggcgauugcgucccaucacccugucacaauggagggaccugcuuggaggaagaggagggcgugcgcugccucugucugccuggauauggcggugacuuaugcgauguagggcugcgauuuuguaacccgggaugggacgccuuccagggcgccugcuacaaacauuuuagcacacggcguucuugggaagaggcugaaacucaguguagaauguauggugcacaccuagccuccauaaguacccccgaggaacaagauuucauuaauaacagguaccgcgaguaucaguggaucggccucaaugaccggacaauugagggggauuuucuguggagcgacggagugccacuuuuguacgaaaacuggaacccuggccagcccgauucuuacuuccuguccggggagaauugcguugucaugguguggcaugaccagggacaauggucagaugugccauguaacuaucaccucaguuauaccugcaagaugggccuggucagcugugguccucccccagaauuaccgcuggcgcagguuuuugggagaccuaggcuucgauacgagguggacacuguguugcgcuaccggugcagagagggacucgcucagaggaaucugccccuaauccguugucaggaaaacggccgcugggaggccccacaaaucucgugcguaccccggagaccugcaagggcccugcacccagaagaggaccccgaaggucgacagggccggcuccuggggcgcuggaaagcucuuuugauuccuccguccucuccaaugcccggaccuuga

SEQ ID NO: 2413 - RNA, 3321 nt, Artificial Sequence
  AAA60049 variant
augagacugcccggcgccaugccugcucucgcacuuaagggggagcuguuguuacugagccuacuccugcuucuggaaccacagaucucccaaggauugguggucaccccgcccgguccugagcucguucugaacgugucuucaacauucguacugacuugcaguggcagcgccccaguggucugggaaaggaugucccaggagcccccucaggaaauggcgaaagcucaggacgggacguuuucuucggugcucaccuuaacaaaucugacuggacuugauaccggcgaguacuucuguacacacaacgacucacgggguuuggagaccgaugaacgcaagcgacuguauauuuuuguuccagaccccacugugggguuccuaccuaaugaugccgaggaacucuuuauauuccugacagagaucaccgagauuacgaucccaugccgugucacugacccgcaacuugugguaacccugcaugaaaagaagggagauguugcauugcccgugccuuacgaccaccagagaggcuuuagcggcauuuucgaggauaggaguuauaucuguaaaacaacuauaggggaccgggaagucgauuccgacgccuacuauguguaccgccuccaggugucuagcaucaacgucuccguuaaugcugugcagaccguagugagacaaggagagaacauuacacugaugugcaucgucauugguaaugaagugguuaacuuugaguggaccuauccaaggaaggagucaggccgguuaguggaacccgucacggauuuccugcucgacaugccuuaccauauccgcaguauacuucacauuccaagcgcagagcuggaagacucugggacuuacacauguaaugugaccgaguccguaaacgaucaucaggacgaaaaggccaucaauauuacuguuguggagucaggauauguccgauugcuaggcgagguggguacacugcaguuugcugaacuccacagaagcaggacccugcaggucguguucgaggccuaucccccgccuacgguucuuugguuuaaagauaaccggacccugggggacaguucugcgggagaaaucgcauuguccacacguaaugugagcgagacucgcuacguaucggaacucacccuggucagagugaagguugccgaggcuggccacuacacaaugagggccuuccaugaggaugcagaagugcaauuaucuuuccagcugcagaucaacguccccgugcggguacuagagcucuccgaaucacacccagacaguggcgagcaaacugugcgaugccgcgggagaggaaugccucagcccaauauuauauggagcgcuuguagggaucugaaacggugcccacgcgagcuucccccuaccuugcuggguaacuccucugaagaggaaagccagcucgagacaaacguuaccuauugggaagaggagcaggaauuugaggucgugucaacucugagacuucaacauguggacaggccacugaguguccguuguacguugcggaaugccguuggccaggauacacaggaagugaucgugguaccgcacucccuccccuucaaggucgugguuauuagcgcgauccuggccuuagugguccugaccauaauuucucuaaucauccucauuaugcuguggcagaaaaagccucgauacgagaucagauggaaggugauugaaucaguuaguagcgacgggcacgaguauauauacguggauccaaugcaacuucccuacgacuccacuugggaguugccuagggaccagcugguacucggacgcacccugggcucuggugcauuugggcaggucguggaagcuacagcccauggcuuaucgcacagccaggcuaccaugaaaguggccgucaagaugcugaaauccacugcacggucaagugagaagcaagcccuuaugucugaauugaaaaucaugagccaucucggaccacaccugaacguugugaaucuacugggcgcuugcacaaaagggggacccauuuauaucaucacggaguacuguagauauggugaucucguagacuaccugcauaggaacaaacacaccuuccuucagcaccauuccgauaagcgccgaccgccuucagcggaauuguauagcaaugcacugccagugggcuuaccccucccuucucacgucucccugacuggggagagugacggaggcuacauggauaugagcaaggacgagucuguggauuauguucccaugcuugacaugaaaggugaugugaaguacgccgacauugaauccucaaacuacauggcuccauaugauaauuacgucccuagugcccccgagcggacaugccgugcaacccugauaaacgaaagcccaguguugucguauauggaccucguuggguuuuccuaccagguggccaauggcauggaguuccuggcuucuaaaaacugcguccauagagaucuagccgcaaggaauguacugaucugugagggaaagcucgugaaaauuugcgacuuuggccuggcgcgcgacaucaugcgggauagcaacuauauuucaaaggggaguacauuccuuccguugaaguggauggcuccugaauccaucuuuaauucucuguacacuaccuuaagcgacguuugguccuucggaauacuccugugggagaucuuuacgcuugguggcacccccuauccagaacugcccaugaacgagcaguucuacaaugccauuaaaagaggguacaggauggcacaaccugcccacgcuucagaugaaaucuaugagauuaugcagaaguguugggaggaaaaauuugagauccgaccacccuucagccagcuagugcuccuguuggaacgccuguuaggagagggcuacaagaaaaaguaucaacaggucgacgaagaguuccuccggagugaucacccugccauacugagaucucaggcaaggcuuccggguuuucaugggcugcguuccccauuggacacaagcucggugcucuacacugcuguacagcccaacgagggcgauaacgacuauauuaucccucugccagaucccaagccugaaguggccgacgagggaccgcuagaaggcucacccucucuggcgaguuccacccuuaaugaggucaacacaagcucuacuauuagcugcgauuccccacucgaaccucaagacgagcccgagccagaaccucagcuggaguugcagguugaacccgagccagagcuggaacaguuaccggauucaggguguccugcuccccgcgccgaggcagaagacaguuuccucuga

SEQ ID NO: 2414 - RNA, 942 nt, Artificial Sequence
  EAX03935 variant
augcugcucagcaagaucaacucccuugcccaccugagagcugcacccugcaaugacuugcaugccaccaaauuagcgccuggcaaggagaaagaaccacuggagucucaguaccaaguggggccgcuacucggaucagguggcuucgggagugucuauagcggaauuaggguuuccgauaaccugcccguggcuauaaagcacguagaaaaagaccggaucucugauuggggcgagcuuccuaaugguacacgcgugccaauggaagucgugcuguugaagaagguuucgucaggguuuagcggagugauucgacuccuggacugguucgagcgucccgauaguuuuguccugauccucgagagaccugaaccagugcaggacuuauucgauuuuauuacugagaggggcgcccugcaggaggaacuugcacgguccuucuuuuggcagguauuggaggccguucgccauugucacaacugcggcgugcugcauagagacaucaaagaugaaaauauacuaaucgaccucaacaggggagagcugaaacuuauugauuucggaucuggugcucuguugaaggacacggucuacaccgauuuugacggcacacggguguauagcccucccgaauggauccgcuaccaccgauaucacgggagauccgcagccguguggucacucgggauucuguuauacgacauggucuguggcgauaucccauucgagcaugacgaagagauaauuaggggucaaguguuuuuccggcagcguguuaguagcgagugccagcaccugauccgcuggugucucgcucuuagaccgucugauaggcccacuuuugaagagauucagaaucauccuuggaugcaagacguacuguugccacaggaaaccgccgagauccaccuacacucccugucacccgggccuagcaaguga

SEQ ID NO: 2415 - RNA, 303 nt, Artificial Sequence
  AAB81333 variant
auggccgacgaggaaaagcugcccccuggcugggagaaaagaaugagcaggccauccgggcggggauacuauuucaaccacaucaccaauccgucucagugggaacgccccucagguaacaguagcuccggcgggaagauuuggcaaggagagccugcucgagugcguagaucucaucuccuugucaaaccaguuaaggcagcccuggauuuggcggcuggcaaucaccccgaccagggugggggaccuggcgccgaucagagguuacauccagaagaccagggccggcgcgaggggcuguga

SEQ ID NO: 2416 - RNA, 492 nt, Artificial Sequence
  AAC50492 variant
auggccgacgaggaaaagcugcccccuggcugggagaaaagaaugagcagguccucugggcggguguacuauuucaaccacaucaccaaugcuucacagugggaacgcccaaguggaaacagcuccucugguggcaagaaugggcaaggagagccggcacgaguccguugcucgcaucuccuuguuaaacacucacagagcagaaggcccaguuccuggcggcaggaaaagauuacacgcacuaaagaggaggcccuggaauugauaaacggcuacauccagaagauuaagucuggugaggaagauuuugagagcuuagcgucccaauucucagacuguaguagcgcuaaagccagaggggaucugggagcauuuucuaggggccagaugcagaagccuuucgaggacgccuccuuugcucuacggacgggcgaaaugucagggccaguguucaccgauagcggaauccauauuauccuccgcacagaguga

SEQ ID NO: 2417 - RNA, 138 nt, Artificial Sequence
  AAH31971 variant
augcagaagcccuucgaggacgccagcuuugcucugagaaccggcgaaauguccgggccuguguucacagauucuggaauccacauuauacucaggacugagugcuggcggcaaacgcgcgguccaaacuguuuuuga

SEQ ID NO: 2418 - RNA, 639 nt, Artificial Sequence
  AAG22596 variant
augaagguguucaaauuuaucggccugaugauucuccuuaccagcgccuucuccgcugggucuggacagucacccaugacaguccugugcaguauagacugguuuaugguuacugugcacccuuucauguugaacaaugauguaugugugcauuuucacgaguuacaucugggucuaggcugcccaccgaaccacguccaaccccaugcauaccaguucacguauagagugaccgaaugugggaucagggccaaggcgguuagccaggacauggugauuuacuccacagagauccacuauucuucgaaaggaacuccuucaaaguuugucauuccagugagcugcgcugcaccccagaaaaguccuuggcucaccaagccauguuccaugcggguagccucuaagagccgcgccacagcucaaaaagaugaaaagugcuacgagguuuucucccugucacagaguagccagcgacccaauugugacugcccuccauguguguuuucugaagaggagcacacccaggucccgugccaucaagcaggcgcccaggaagcucagccccuucagccuucccacuuccuggauaucucagaggacuggagcuugcauacugaugacaugauagguaguauguga

SEQ ID NO: 2419 - RNA, 1986 nt, Artificial Sequence
  AAB00386 variant
auggaccuggugcucaagagaugccuucugcacuuggccgucaucggcgcuuuacuggcaguuggggccaccaaagugcccaggaaccaggauuggcuaggaguaagccggcaacuccgcacaaaggcguggaaucgacagcuguacccugaguggacugaagcucagcgucuugacuguuggagagguggccaggugucccugaaagucucuaacgaugggccaacguugauuggagccaaugcaucauucaguauagcccucaacuuuccgggcagccaaaaggugcugcccgacggucagguuaucugggugaauaacaccauuaucaaugggucccaggucuggggaggccagccuguguauccacaagagacagaugacgcuugcauuuuccccgauggcgggccuuguccaucuggaucguggucacagaaaaggagcuuuguauacguuuggaagacuuggggucaguauuggcaagugcugggcgggcccgucaguggacucuccaucggcaccggucgggcaauguuagggacacauaccauggaagugacuguguaccaccgcagaggaucuaggagcuaugucccucuggcccauuccucaagugcuuucacaauaaccgaccagguuccauuuagcgugucuguaucccagcuucgggccuuggauggcggcaacaagcacuuccugcgcaaucagccgcuaacguuugcgcuccaacugcaugaccccucaggguaccuugcagaggccgaucugagcuauacuugggacuucggagauaguucugguaccuugaucucccgagcucucguggucacacacacuuaccuggaaccuggcccagugaccgcccagguuguguuacaggcagcuauuccccugacaagcugcgggucgucuccugucccaggaaccacggacggccacagacccacugccgaggcgccgaacacaaccgccggucaggugccuacuacagagguaguugggaccacgcccggccaagcaccaaccgcugaaccuuccggaacaacuucagugcagguccccaccacagaggugaucaguacugccccaguccagaugcccaccgcugaaagcacaggcaugaccccugagaaagugccaguuuccgaggugauggggacuacgcucgccgaaaugucuacaccggaggcaaccggaaugacucccgccgaaguaagcauugucgugcuuucagguaccacagcugcgcagguuaccacuacagaguggguggaaacgaccgcaagggagcugccuaucccagagcccgaaggcccugacgccaguuccauaaugagcacugagucuauuacagggucauugggaccacuacuggauggcaccgcuacacuccggcuggucaagcgucaagugccccuugacuguguacuguaccgcuaugguaguuuuagcgugacuuuggauaucguucaggggauugaauccgccgagauccuccaggcagucccgucuggcgaaggagacgccuucgagcugaccgugucgugccagggcggguuaccuaaagaggcuuguauggaaaucagcuccccaggaugccaacccccugcccagagacugugucagcccgugcuaccaaguccugcaugccagcucguccugcaucaaauucuuaaggguggcucagggacguacuguuugaauguuucucuggcggauaccaacagccucgcugugguguccacacagcugauaaugcccggacaggaggccggccuuggucaaguaccacugaucgucgggauuuugcucgugcugauggcaguuguguuagccucacugaucuauaggcggcgacuaaugaaacaggacuuuagcgucccgcagcucccucacucuuccagucauuggcugcgccuucccagaauauucugcagcugcccaauuggcgaaaauucucccuugcuguccggacagcaaguguga

SEQ ID NO: 2420 - RNA, 2649 nt, Artificial Sequence
  CCDS10255.1 variant
auggagcccgccccugcuagaagcccaaggccgcagcaagaccccgcacggccucaggaaccaaccaugcccccuccagagacacccuccgaaggccgccagccuucuccaucaccgagucccacugagcgagccccugcgagcgaagaggaguuccaguuucugcguugccaacagugucaggcugaagccaagugcccaaaacuccuucccugucugcacacguugugcuccggguguuuagaggcaucuggaaugcagugcccuaucugucaagccccauggccccugggugcugauaccccggcacuagacaacguguucuuugaaucgcuccagagaaggcugucagucuaccggcagauuguugaugcccaggcugugugcacacgcuguaaggagagcgccgacuucuggugcuuugagugugaacaacuucugugcgcgaaaugcuucgaggcacaucagugguuuuugaagcacgaagccagaccucucgcugagcugaggaaucagaguguacgggaauuucuggauggcacucgcaaaaccaacaauauauuuuguuccaaccccaaucaucgaacaccaacccucacuucuaucuauugcagaggguguagcaagccuuuaugcuguuccugcgcccugcuugacucaagucacagcgaguugaagugugauauuucugcagagauccaacagaggcaggaagaacuggacgcuaugacacaggcccuacaagaacaggauuccgcguucggagccgugcaugcacagaugcacgcugccgucggccagcucggucgggcucgugccgagaccgaggagcugauucgcgagagagugaggcaaguuguggcacacguccgggcccaggaacgagagcuucuggaagcuguggacgcgcgcuaccagagagauuaugaggaaauggcaucaagguuggggcggcucgacgccguacugcagcgcaucagaacgggaagcgcuuuaguucaaaggaugaaaugcuacgccagugaucaggaggugcuggacaugcauggcuuucuccgucaggcacuuugucggcugcgacaggaggaaccccaaucuuugcaggccgcugucagaacugacggcuucgaugaguuuaaggugaggcuacaggaccuguccagcugcauaacccaagggaaagaugccgcagugucgaagaaagcgucuccagaagcugccuccacaccccgcgacccuaucgaugucgaccucccagaggaggcagaacggguuaaggcccaggugcaggcucugggacuugccgaggcacagccgauggcuguagugcaaucaguccccggugcccacccugugccaguuuaugcguucaguauuaagggccccagcuacggggaagauguguccaacacuaccacagcccagaaaagaaaguguucucagacccagugcccuaggaaagucaucaagauggagagcgaagagggaaaagaggcucgccuggcacgaucaaguccagaacaaccccggccguccacgagcaaggccgugucuccuccacauuuggacggucccccuucaccccguaguccaguaauuggcagcgagguuuuccucccuaauuccaaccacguggcuucuggggccggagaagcagaggaaagagucguggucaucucgagcuccgaggauucagacgcggagaauaguucuagcagggaacuggaugacuccucaagcgagucuuccgacuuacagcuggaaggccccaguacucuacgcgugcucgaugagaaccuggccgacccacaggcugaagaucggccgcuuguuuucuucgacuugaaaauagauaaugagacacagaagauuagccaacuggccgcagugaacagagagucuaaguuuaggguagucauccagccugaggcuuucuuuuccauuuauucaaaagccgugagucucgaaguuggccugcagcacuuccuuagcuuucugucguccaugcgacgccccaucuuggcaugcuacaagcucugggggccaggacugcccaauuucuuucgggccuuagaagacaucaacagacugugggaguuccaagaggcuauuucugguuuucuagcggcccucccucugauaagggaacgugugccaggcgcaagcucauucaaacuuaagaauuuggcucagaccuaccuggcccgcaacaugagugagcgguccgccauggcugcaguccucgccaugagagaucuguguagguuacuggaagugucucccgggccucagcuugcgcagcauguauauccguuuagcuccuugcaaugcuucgcuucacuccagccacuggugcaggccgcaguucuaccccgagccgaggcucggcugcucgcacugcacaacgucagcuucauggaacuuuugagugcccaucgcagagacaggcagggaggccugaaaaaguacucucgguauuuaucccuccaaacuacaacccugccuccagcgcagcccgcuuuuaaucuucaggcccuggguacguacuucgagggguugcucgagggcccugcacuggcccgagcugaaggagugagcaccccgcuagccggcagagggcuggcagagcgcgcuucgcagcaaucauga

SEQ ID NO: 2421 - RNA, 3228 nt, Artificial Sequence
  CCDS46409.1 variant
augguggucgagguugacagcaugcccgccgcuuccucugugaagaaaccuuucggccugagaucaaagauggggaaauggugcuguaggugcuuuccauguugccgggaaaguggaaagagcaacguagguaccuccggcgaucacgacgauucugcaaugaaaacacuccgcucgaagauggggaaguggugucgacauugcuucccguguugccguggaucaggcaaaagcaaugugggugccaguggggaccacgaugacuccgcgaugaagacucuuagaaacaaaaugggaaagugguguugccauuguuuucccugcugcaggggcucuagcaaauccaaggucggcgcuuggggagauuacgacgauucagccuucauggagccucgguaucacgugcgcggggaagaccuggauaaguugcauagagcagccuggugggguaaaguuccaaggaaggacuuaaucgugaugcugcgggauacggacgucaauaaacaggacaagcaaaaacgcaccgcucuacaccucgcaagugccaacggcaauagcgaggugguaaagcugcuucuggaucgaagaugucaguugaacguucucgacaauaaaaagaggacagcucugauuaaggccgugcagugccaggaagaugagugugcgcugaugcucuuagagcacgggacugaccccaacauaccugaugaauacggaaauaccacacugcauuaugcaaucuacaacgaggacaaacuuauggccaaggcuuugcugcuauauggcgccgauauugaaucuaaaaauaagcacggucucaccccacugcuucuggggguccaugagcaaaaacaacagguggugaaguuuuugaucaagaaaaaggcaaaccucaaugcucuggaccgguacggacguacugccuuaauucuggcggucugcuguggcuccgccucaaucguuagccuccuucuggagcagaacauagaugugaguucucaggacuuguccggccagacagcacgcgaauaugcuguaagcucgcaccaccaugugaucugccagcuacugucugauuacaaagagaagcagaugcucaaaauuuccucagaaaauaguaaccccgagcaagaccugaaacuuaccagcgaagaggagucccagagauucaaggggucugaaaacagccagccugagaagaugucacaagaaccagagaucaauaaggacggagauagggaagucgaggaggaaaugaaaaagcacgagaguaacaaugugggucuguuggaaaaccucacgaauggcguuacugccgggaacggagacaauggccugauuccgcagcggaaaucccgaacccccgagaaccagcaguuuccugauaaugaaagcgaggaguaccaucgcaucugugaauuacugucugacuauaaggagaagcaaaugccaaaauacucaagugaaaacagcaaucccgagcaggaucuaaagcucacauccgaggaagagucucagagacugaaagguucggaaaacgggcagccugagaagaggagccaagaaccagagauaaauaaagacggcgaucgggagcuugaaaacuucauggcuauugaggaaaugaagaaacaccgcuccacucaugugggauuucccgagaauuugaccaacggcgccacagcagggaacggagacgauggucugaucccgccuagaaagucaaggacccccgaaagucagcaguucccagacacggagaaugaggaauaucacucugaugagcagaacgacacucaaaagcaguuuugcgaggaacagaauacaggcauucuccacgaugaaauccugauccaugaggagaaacagauugaagucguggagaagaugaacagcgaacuuucccugucauguaaaaaggagaaagacauauugcacgagaauagcacccuccgugaagagaucgccaugcugcgguuagaacuggacacuaugaagcaucaaucucagcuacgagagaagaaauaccucgaagauauugaguccguaaagaaaagaaacgacaaucugcuuaaggcuuugcagcugaacgagcucacaauggaugacgauaccgcgguucuggugaucgacaaugggaguggaaugugcaaagcaggcuucgccggugaugacgcuccuagggccgucuuucccagcauaguggggcgcccacggcaacagggcaugaugggaggcaugcaccagaaggaaucuuaugucgggaaggaggcacaguccaaaagaggaauuuuaacgcugaaguaccccauggaacacgguaucaucaccaacugggaugacauggagaaaauuuggcaucacacauucuauaaugaacuuaggguggccccugaggagcauccaguuuugcucacugaagcuacccugaacccgaaggccaaucgcgagaaaaugacacaaaucauguucgaaacuuuuaacacccccgcaauguacguggcgauucaggcuguacuaucacuguacacaaguggccgaaccacugggauagucauggauagcggagacggcgugacgcacacaguuccuaucuaugaggguaaugcccucccacaugcaacccugcggcuugauuuggccgggcgugaacugcccgacuacuuaaugaagauucucacugagcacggcuauagauucaccacaauggcugagagggaaaucgugcgcgacaucaaggagaaacuguguuacgucgcccuugauuuugaacaggagauggcaaccguggcuucguccucuagccuggagaagucauaugaauugccugacggacagguaauuacuauaggcaacgagcgguucagaugcccagaagcccucuuucaacccugcuuccuggggauggagaguuguggaauccacgaaacaacguuuaacuccauuaugaaaucugauguggacaucaggaaggaucuauacaccaauacuguucugagcggcgguacaaccauguauccggggauggcgcaucgaaugcagaaagagauugccgcucucgcaccuuccaugaugaagauccgcauaaucgccccacccaaacggaaguacucagucugggugggaggcagcauucuggcuagucuuucuacauuccagcagauguggaucuccaagcaagaguacgacgaaagcgguccuucgauugugcacagaaaaugcuuguga

SEQ ID NO: 2422 - RNA, 1755 nt, Artificial Sequence
  CCDS13562.1 variant
augguggccgaggucugcagcaugcccaccgcuuccacaguuaagaaaccuuucgaccugagaucuaagaugggcaaauggugucaccauagguuuccaugcugucgggggucaggaaagaguaacauggguacuagcggcgaucacgacgauuccuucaugaaaaugcuccgcucuaagauggggaagugcugucgacauugcuuuccguguugccguggaucgggcacgucaaauguggguaccagcggggaccacgaaaacaguuucaugaaaaugcuuagauccaagaugggaaaaugguguugccauuguuuucccugcugcaggggcucuggcaagagcaauguaggggcauggggagauuacgaccacuccgccuucauggagccucgguaucacauccgcagagaagaucuggacaaauugcauagggcggcuuggugggguaaggugccacggaaggauuuaauugucaugcugcgcgacacagauaugaacaaacgagacaaggagaaaagaacugcccuacaccucgcaucagccaauggcaacagugaagugguucagcugcuucuggauaggcggugucaauugaaugugcucgacaacaagaaacguaccgcucugauaaaggcaauccagugccaggaggacgaguguguccugaugcucuuagaacauggggccgaucgcaauauucccgacgaguacggaaacacagcucugcacuaugccaucuacaaugaagauaaacuuauggcgaaggcauugcugcuauauggcgccgacauugagagcaagaacaaaugcggucucaccccucugcuucugggggugcacgagcagaagcaacagguaguuaaauuuuugaucaagaaaaaggcuaaucucaacgugcuggauagauacggaaggacugccuuaauacuggcagucuguugcggcucugcuuccaucgugaaucuccuucuggaacagaacguggacgucucaagccaggauuugaguggccaaacagcccgggaguaugcgguuucuucccaucaccaugugauuugugaacuacugagcgacuacaaggagaaacagaugcucaagaucucgucugaaaacuccaauccagagcaggaucugaaacuuaccucagaggaagagagucagcgacugaagguaagcgaaaacucccaacccgagaaaaugucucaggaaccugagauuaauaaggacugcgaucgcgagguggaagaggaaaucaagaaacacgggagcaacccagucggauugccggagaaucucacgaacggugccucagcaggcaauggggacgacggacugauaccccagagaaggagucggaagccugaaaaccaacaguucccagauacugagaaugaggaauaccauuccgacgagcagaacgauacccgcaaacaguuaagcgaagaacaaaauacaggcauuucucaggacgagauccugacuaacaagcagaaacagauugaaguggcugagcaaaagaugaauagugaacuaucacucagccacaagaaagaggaagaucugcuuagagagaacuccguuuugcaggaggaaaucgccaugcugaggcucgagcuggacgaaaccaagcaccagaaucagcuucgugagaacaaaauccuggaagagauugagucugugaaggagaaaacagauaaguugcuccgggcuaugcaacugaacgaggaagccuuaaccaaaacgaauauauga

SEQ ID NO: 2423 - RNA, 1530 nt, Artificial Sequence
  EAW59519 variant
auggagagaaggcggcuguggggcagcauccagucccgcuacauuucuaugucaguguggaccaguccccgacgucucgucgaacuugccgggcaaagccuguugaaggacgaggcuuuagcaauagccgcgcuggaacuacucccuagagagcuguucccaccgcuuuuuauggcugccuucgauggaaggcacucccagacacugaaagcaaugguucaggccuggcccuuuacuugcuugccucucggugugcugaugaagggccagcaucugcaccucgaaacguucaaagcuguauuagacgggcuggaugugcuuuuggcacaagagguccggccacgcagauggaagcuacaggugcuggaccucaggaaaaacucucaucaggauuuuuggaccguuuggucgggaaaucgggccucacuguauagcuuccccgagccugaagcugcccagccaaugacaaagaagcgcaaaguggacggccuuaguacugaggcggaacaacccuuuaucccugucgaggugcugguagauuuguuccucaaggagggugcaugugacgaacuguuuuccuacuuaauugagaaaguuaagcgaaagaaaaacgugcugagacucugcuguaagaaacuuaagaucuucgccaugccaaugcaggauauuaaaaugauccugaagaugguccaguuggacucuauagaagaucuagaggugaccugcacauggaaacugccgacccucgcuaaguuuagccccuaucuggggcagaugaucaaucuuaggcggcuguugcucucccacauucaugccucaaguuacaucagcccugaaaaagaggagcaauauauugcacaguucacuucucaguuucuguccuuacaaugucugcaggcucuauacguggacucacucuucuuccugcguggacgccuugaucaguugcugagacacgucaugaacccacucgaaacacugagcaucaccaauugcaggcuuagugagggcgacguuaugcaccugucucagucccccagcgugucgcaauugucuguacucucccugucaggcgugauguuaacggacgucaguccugaaccacugcaggcccuacucgagcgggcgagcgccacucugcaggaucuuguguuugacgaaugugggauaaccgaugaccaguugcuggcacuccugcccuccuuaucucauugcagccaacugacaacucuuucauucuauggaaacaguauuuccaucagcgcuuugcagucucuccugcagcaccuaauuggucugucaaaucucacccauguucuguacccggugccucuugagaguuacgaggauauccacggcacauugcaccuggaacgauuagccuaucuccaugcucgccugagagagcuucugugugaauuggggaggcccagcauggucuggcucuccgccaacccaugcccucacuguggagaccggaccuuuuacgaucccgagccaauccugugccccugcuucaugccuaauuga

SEQ ID NO: 2424 - RNA, 1530 nt, Artificial Sequence; identical to SEQ ID NO: 2423
  AAC51160 variant

SEQ ID NO: 2425 - RNA, 645 nt, Artificial Sequence
  CCDS8069.1 variant
augggccuggccggggugugcgcucucagaaggagcgcaggauacauccuugucgguggcgccgggggacaguccgcggcugccgcagcccggcgcuauucugagggcgaaugggcuucaggugggguucgaaguuucagccgugcagccgcugccauggcgcccauuaaggugggagacgcaauaccugccguagagguguuugaaggcgagccaggcaacaaagucaaucuggcugaauuguucaaggggaaaaagggaguguuauuugguguuccgggcgccuucacccccggguguuccaaaacacaucugccuggauuuguggagcaagcagaggcucuaaaggccaagggcguccaggugguagcgugccucucuguuaacgaugccuucgugacuggugaaugggggagagcacacaaagcugagggaaaggucaggcugcuugccgacccaacgggcgcuuuuggcaaagaaaccgaucuguugcucgacgauucgcuggugucaaucuucgggaaucggcgccugaagagauuuagcauggugguccaggacggaauuguuaaagcccucaacguggagcccgaugguacaggcuuaacuuguagucuggcaccuaauaucauuucccagcuuuga

SEQ ID NO: 2426 - RNA, 309 nt, Artificial Sequence
  AAA63250 variant
auggugagauacaggguccggagccuguccgagcgcucucacgaaguuuaucgacagcaacuccauggccaggagcaggggcaccauggacaggaggaacaaggucuuucacccgaacacguggagguauacgagcguacccauggccagagucacuauagaaggcggcacugcagccgcagaaggcugcaucggauccaccgccgacagcauagauccuguaggcggcguaagcgcagaucuugcaggcaccggcgacgccacagaagggggugucggacacgcaaaagaacuugcaggcgucauuga

SEQ ID NO: 2427 - RNA, 1662 nt, Artificial Sequence
  AAH50416 variant
auggugcagagacugugggucagcaggcuccuucggcaccgcaaggcccaacuguuguuaguuaaccugcuaaccuucggccucgaggugugccuggcugcagggaucacauacguacccccucuucuguuggaagugggagucgaggaaaaauuuaugacuauggugcucgguauuggcccaguucuggggcuggugugugucccgcucuuaggauccgccucugaccauuggcgaggccguuaugguagaaggcggcccuucauaugggcgcugucacuugggaucuugcugagucuauuucucauuccucgcgcuggauggcuggccggccuucugugcccagaucccagaccuuuggagcucgcacuguuaauccugggcguggggcuccuugacuucuguggacagguaugcuuuacgccacuggaagccuugcuaagcgaucuguucagggaccccgaucacugucggcaggcuuacuccguuuaugcauuuaugauuucucucgguggcugccugggguaccuucugccugccaucgacugggauaccucggcuuuggccccauaucucggaacacaggaggagugucuguucggcuuacugacucuaauauuuuugaccugcguggcggcaacacugcuugucgccgaagaggcugccuuggguccgaccgaacccgcagaggggcugucagcuccuagccucaguccacauuguugccccugucgcgcccgacuggcguucagaaaucuuggagcccuguugccuaggcuccaccaacugugcugccggaugccacguacuuuacgcagacuguuuguggcagagcuauguuccuggauggcucucaugacauucacccuguuuuacacggacuucgugggcgaaggccuuuaucaggggguccccagggccgagccgggaacugaagcucggcgacauuacgaugaggguguucgcaugggcucuuuggggcuguuccuccagugcgccaucagccugguguuuuccuuaguaauggacagacuggugcagagguucggaacccgggcagucuaccuugccucaguggcugcguuuccuguugcagccggcgcuacauguuugagucacagcguggccgucgugacugcaucugccgcucucaccgguuucacauuuuccgcccugcaaauucuacccuauacccuggcaucacucuaccaccgcgaaaagcagguauuccugccaaaauauagaggggauacgggcggagcgagcagugaggacucucuuaugacuuccuuuuugccuggccccaagccaggggcucccuucccuaacggacauguuggugccggcgggagcggacuguuaccaccgcccccugcacucugcggcgccucggcuugugaugugucugucaggguggucgugggugagccaacagaagcccguguugugcccgggcggggcaucugccuggaccuugcaauucuggacuccgcuuuucuccucucacagguagccccuagucuguucaugggaagcaucguccagcuaucccaaucugugaccgcguacaugguuagcgccgcuggccuggggcucguggcaauauauuuugccacucaggucguguucgauaaaucagaccuggcuaaguacagugccuga

SEQ ID NO: 2428 - RNA, 648 nt, Artificial Sequence
  CBI83574 variant
auggccagccugcagaugagaggcaaccccgggucccacuucugcggagguacccucauccauccuucuuuugugcuuacagcugcacacugucugagggacauuccacaacgguuggucaauguuguguuaggcgcccauaacguacgcacucaggagccgacgcagcagcacuucucaguggcgcaagucuuucugaauaacuacgaugcugaaaauaagcuaaacgacauacuccugauccagcuuaguagccccgccaaucuguccgcaucuguggccaccguucaguugccucagcaagaucagccagugccccaugggacacagugccucgcuaugggauggggccgagucggugcacacgacccuccagcccaggugcugcaagagcugaacguaacuguugugaccuucuuuugucguccccacaauauuugcacauucgucccuagaaggaaagcugggaucuguuuuggagauucgggcggcccacucauuugcgacgggaucauacagggaaucgauucauucgugauuugggguugugccacccgguuauuuccggacuucuuuacucgcguggcgcuguaugucgauuggaucagaagcacacuuaggcggguugaagcaaagggccgccccuga

SEQ ID NO: 2429 - RNA, 771 nt, Artificial Sequence
  AAH96183 variant
auggcccacagacccccuagcccagcucuggcauccgugcuccuugcccuguuguuaucuggcgcggcuagggccgcagagaucgucgggggacaugaagcccagccgcacucacggcccuacauggcuagucugcaaaugcgcgguaacccuggcagccauuucugcgggggaacccuaauucacccauccuuuguucucacagcagcccauugucugcgagacauaccccagcgucuugugaauguagugcugggcgcucacaacgucagaacucaggagccuacgcagcaacacuucucuguggcccagguguuuuugaauaacuaugaugcggaaaauaagcucaacgacguucugcugauccagcucucgucaccagcaaauuuaagcgccagugucgcuaccgugcagcugccccaacaggaucagccuguaccacaugguacacagugccuugccaugggguggggaaggguuggcgcacacgacccgcccgcucaaguguugcaggagcugaacgucacuguggugaccuucuuuugucggccucauaauauuugcacauucgucccacgcagaaaagccggcaucuguuuuggggauuccggagguccccuaauuugcgacggcaucauacaggggaucgauucuuucguuauuuggggaugugcgaccaggcucuuuccugacuucuuuacucggguggcccuguacguagauuggauccgcagcacacuucgaagaguggaagcaaagggcaggccauga

SEQ ID NO: 2430 - RNA, 2760 nt, Artificial Sequence
  CCDS45721.1 variant
auguggcuggccgcugcagcccccagccucgcgagaaggcuucuguucuugggcccuccaccgcccccuuuacugcuacucguguuuucccggucuucacgccgacgucugcacagucuugggcuggcugccaugccagagaagagacccuucgaaagguugccugcagacgucagcccaaucaacuacucccucugccugaaacccgaucugcucgacuuuaccuucgagggaaaguuagaagccgcugcacagguucggcaagccacaaaucagauugugaugaacugugcugauauagacaucauuacugccucuuaugcgccugagggugaugaagagauccaugcaacgggcuuuaauuaccagaacgaggacgaaaaaguaacccugucguucccaucaacacuucagacugggaccggaacauugaagauugauuuugugggcgagcugaaugacaaaaugaaggguuucuaucgcagcaaguacaccacuccgaguggggaagucagauaugccgcugugacacaauuugaggccaccgaugcaaggcgggcuuuccccugcugggacgagccugccaucaaagcgacguuugauauaucccuaguugugccaaaggaccgcgucgcccucucuaacaugaaugugaucgaucgaaaacccuacccugacgacgaaaaccugguagagguuaaguucgcaagaacuccagugaugagcaccuaucuugucgcuuuuguggugggagaauacgauuucgucgagacaagguccaaagacggcguuugugugcggguauacacucccgugggcaaggccgaacaggggaaguucgcucuggaggucgccgcaaaaaccuugccguuuuauaaggauuacuucaaugugccuuauccccucccaaaaauugaccugaucgccauugcugauuuugcggcaggagccauggagaacugggguuuaguuacauaccgugaaaccgcucugcucaucgacccuaaaaauucaugcaguagcucucgccaguggguggcccuugucgugggccacgagcuggcacaucagugguucgggaacuugguaacgauggaaugguggacucaccuauggcugaaugagggauuugccuccuggauagaauaucucuguguugaucauugcuuccccgaguacgacauuuggacacaauuugugucagcugauuauaccagagcccaggagcuggacgcacuugauaacagccacccaaucgaagucagugugggccaccccucugaggucgacgaaauuuucgacgcgaucuccuacagcaagggugcuucggugaucaggaugcugcaugauuacauuggggacaaggauuuuaaaaagggaaugaauauguauuugacuaaguuccagcagaaaaacgccgcaacagaggaccucugggaaucucuggagaacgccuccggcaagccuauagcugccguuaugaauaccuggacgaaacaaaugggcuuuccauuaaucuacguggaggcagaacagguagaggaugaccggcugcuacgacucucacagaagaaauucugugcugggggaaguuaugucggugaagauugcccgcaauggauggugcccauuaccaucagcacauccgaggacccuaaccaggccaagcugaagauacuuauggauaaaccagagaugaauguuguguugaagaacgucaaacccgaccagugggugaagcugaaucucggcacuguaggguuuuaccgcacccaguauucuagcgcgaugcuggaaucacuucugccuggaauuagagauuugagucucccacccguggacaggcugggcuuacaaaacgaucuguucucccuagcccgggcugguaucaucagcacaguugagguccucaaagugauggaagcauucgugaaugagccgaacuacacugucuggucugaccugucauguaaucuugggauuuugaguacccugcucagccacacagacuuuuaugaagagauccaggaguucguuaaggauguguuuuccccuauuggcgaacgccugggaugggacccaaagcccggcgaggggcauuuagaugcccugcuuagaggauuggugcucgguaaacugggcaaggcugggcacaaagccacccuagaagaggcaaggcgucgguucaaggaccacguagaaggaaaacagauacugucugcggaucuccgaucgccugucuaccugacugugcuuaagcauggcgacgguacgacauuggauaucaugcugaaguuacacaaacaggccgacaugcaagaggagaagaacagaauugaaaggguucucggggcuacccugcuucccgaucugauccagaaaguguugacuuuugcccucagcgaggaaguccgcccacaggacaccguguccguuaucggcggaguggcaggcgggucaaagcauggacggaaagcugccuggaaguucauuaaagauaauugggaggaacuguacaacagauaucaggguggcuuucuaauaaguaggcugaucaagcucucuguagagggguucgcagucgacaagauggccggagaggugaaagcguuuuucgaaagccacccugcucccuccgccgagcgcacaauucaacagugcugugaaaauauccugcuuaacgcagcuugguugaagcgagaugccgagucaauucaucaguaccuguuacagcggaaagccagcccaccgaccguguga

SEQ ID NO: 2431 - RNA, 660 nt, Artificial Sequence
  AAH65513 variant
augcugagagccggcgcucccaccggggaccucccuagggcaggagaggugcacacagguacuacgaucauggccgucgaguucgauggcgggguugugaugggaagcgacucccggguaucugcgggcgaagcuguggucaaccgcguguuugauaaacuuucaccacugcaugaacgaauuuacugcgccuugagugguagcgcagccgacgcucaggcaguugccgauauggcugccuaucaauuagagcugcacgggauagaacuagaggagccgccccucgugcuggcggcagccaaugucgugcguaacaucuccuacaaguauagagaagaccuuucugcucaucugaugguagccggaugggaucagagggagggcggccagguuuacgggaccuugggagguaugcucacacggcagccuuucgcaauuggcgggucgggaucaacuuuuaucuauggcuacguggacgcugccuauaagccagguaugagccccgaagagugucgcagauucaccacagaugcgauugcccuggcaaugaguagggacggguccucuggaggcgucaucuaccuggugaccauaacugcugccggcguggaucaccgggucauccucgggaaugaguuaccuaaauuuuacgacgaauga

SEQ ID NO: 2432 - RNA, 345 nt, Artificial Sequence
  EAW82312 variant
auggccggccuggcucuccagcccgggaccgcacuucugugcuacagcuguaaggcccaaguguccaacgaggacugcuugcaggucgaaaauuguacacaguuaggagagcagugcuggacugcgagaaucagggcuguuggucugcuaacggugauuucuaaaggcuguucacucaacugcguagaugacagucaagauuauuacguggggaagaaaaauauaaccuguugcgacacagaucuguguaacgccagcggagcacacgcccuucagccugcugcagccauccuggcuuugcucccagcccugggccugcucuuaugggguccggggcagcuguga

SEQ ID NO: 2433 - RNA, 372 nt, Artificial Sequence
  AAC39607 variant
augaaggccgugcugcucgcacuucugauggcuggcuuggccuuacagcccgggaccgcgcugcuaugcuacagcuguaaagcucaagucuccaacgaggacugccuccagguugaaaauuguacacagcugggagagcagugcuggacugccagaaucagggcagugggucuucugacgguaauuucuaagggcuguucauugaacugcguggaugacagucaagauuauuacgucgggaaaaagaauauaaccuguugcgacacagaucucuguaacgccagcggagcucacgcacugcagccugccgcugccauccuggcgcucuuaccagcacugggccuuuugcugugggguccggggcagcuauga

SEQ ID NO: 2434 - RNA, 963 nt, Artificial Sequence
  AAG40776 variant
augagcuccugcaacuucacccacgccacauuugugcugaucggcauucccgggcucgagaaggcucauuucugggucggauuuccucuucugucuauguacguuguggcaauguucgguaauuguauaguaguguuuaucgucagaacugaaaggucauugcacgccccaauguauuuauuccugugcaugcuagcggcuauugaccucgcccugaguacgagcaccaugccgaaaauccuugcacuguuuugguucgauucccgggagauuucuuuugaagccuguuugacacagauguucuuuauccaugcucucucggcaauagagucaacuauccugcuggccauggcuuucgaccgcuacguggccauuugccacccccuccgacaugcggcaguuuuaaacaauaccgugacagcccaaaucggcauugucgcugugguacgugggagccuguuuuucuucccucuuccauugcugaucaagagacuagccuuuugucacaguaacguucucucccacucuuauugcgugcaucaggaugucaugaaacuggcauacgcugacacccuucccaaugugguguauggacugacugccauauugcucgucaugggcguugaugugauguucauuagccuguccuacuuuuuaaucauuaggacaguacugcagcucccuucaaagagugaacgggcgaaagccuucgguaccugugugagccacaucggggucgugcuugcauuuuauguuccacugaucggauugucugugguccaucgcuucggcaacucccuacaccccauugugagaguaguuaugggcgacauauaccugcuccugccuccagugaucaauccgauuaucuacggggcuaagacgaagcagauaaggacucggguccuugccauguuuaaaauuucaugcgauaaggaccugcaagcugugggagguaaauga

SEQ ID NO: 2435 - RNA, 2253 nt, Artificial Sequence
  AAA60209 variant
auguggaaccugcuccacgagaccgacagcgccguggcuacagcaagaaggccccgguggcuuugcgccggcgcgcuggucuuggcugggggauucuuuuuacuggguuuccuauuuggcugguucaucaaguccucuaaugaagccacuaacauuacgccuaaacauaauaugaaggcauuucucgaugagcugaaagccgaaaacauaaagaaauuccuuuacaauuuuacccagaucccacaccuggcugggacagagcaaaacuuccaguuggcaaagcagauucagucacaauggaaggaauuuggacucgacaguguugagcuggcccauuaugaugugcugcucagcuacccgaauaaaacucaccccaacuauaucuccauuaucaaugaggacggcaacgaaauauucaauaccucuuuauuugagccuccacccccugguuacgaaaacguaucggauaucgugccacccuucucagcuuuuagcccucaggggaugccagagggagaccuggucuaugugaauuacgcccgcacagaggauuucuucaagcuagaacgagacaugaaaauuaacuguaguggcaagaucguuauugcgcguuauggcaaaguguuuagagggaauaaggucaagaacgcacaguuggccggagcuaaaggugugauccuguacuccgauccggccgacuacuucgcacccggcguaaagucuuauccugauggguggaaccuaccaggaggcgguguucagagggggaauauacucaaccugaauggagcuggcgacccccuuaccccuggcuacccagccaacgaguaugcguaccggcgcgggauugccgaagcagugggacugcccagcaucccgguccauccuauugguuauuacgaugcucaaaaauugcucgagaagaugggcggguccgcucccccagacucaaguuggagaggaagccugaaagugccuuauaaugugggccccgguuuuacugggaacuucucuacacagaaggucaaaaugcacauccacuccaccaaugaaguuacgaggaucuacaacgugauuggcacuuuacggggagccguagagccagaccgcuacgugauacugggcgggcaucgagauucaugggucuuuggagguaucgacccccagagcggcgccgcagugguucacgagauugugagaaguuucgggacccucaagaaggaaggauggaggccucggcguacaauccuuuuugccucuugggaugcugaggaguucggccuguuggguuccacugaaugggcggaagagaauagccgccuacugcaggagagaggggucgcauauauaaacgccgacucgucuauugaaggcaauuacacccucaggguggauugcacaccacugauguauucccuuguacauaaccugaccaaagaguugaagucaccggacgaaggauuugagggcaaaagucucuacgaaagcuggacgaagaaaucccccucuccugaguucagcgggaugccacggaucucaaagcugggaagugguaaugauuuugagguuuucuuucaacgauuaggcaucgcuuccgggcgcgccagauauacuaagaacugggaaacaaauaaauucagcggauacccccuguaucacucuguguacgagaccuacgaacuugucgagaaguucuaugacccuauguuuaaauaccaccucacuguggcacaggucaggggcgguaugguguucgagcuggccaacucaauuguucuuccauuugauugucgggacuaugcugugguauugcgcaaguacgccgauaaaaucuauaguauuagcaugaagcauccccaggaaaugaagacauacuccgucucuuucgacucgcuguuuagcgcagugaaaaacuucaccgagauagcguccaaguuuucagaaagacuccaagacuucgauaaaaguaauccgaucguucugaggaugaugaacgaccagcuuauguuucuggagcgugcuuucauugauccuuuggggcucccagaccggcccuuuuaucgacacgugaucuacgccccuucuagccauaauaaguacgcaggcgaauccuuccccggaaucuaugaugcccuguuugacauugagucaaaagucgauccaagcaaggcuuggggcgaggugaagagacagauauacguagccgcauucacggugcaggcugccgcggaaaccuuaucugagguugccuga

SEQ ID NO: 2436 - RNA, 3921 nt, Artificial Sequence
  CCDS1397.2 variant
augaccauguaccuguggcucaagcuccuggccuucggcuuugcuuucuuggacacagagguguuugucacugggcagagccccacgccuuccccaaccggauuaacaacugcaaaaaugccgucuguuccccugucaagugauccucuaccaacccacacaaccgccuucagccccgcguccacuuuugaaagagagaacgacuucucugaaacaaccacgucgcucucaccugauaauacuagcacccaagugaguccagacucccuggauaacgcuucugccuuuaauacaacugguguaagcuccgugcagacaccccaucuuccuacccacgcagacucacagaccccaagugccggcacggauacucagacauucagcgggucugcugcaaacgccaagcugaauccgacccccggauccaacgcuaucucagacgucccuggcgagaggagcacugccaguacauuuccaaccgaucccgugucuccuuugacgaccacacucucccuggcgcaucacagcucggcagcccugccagcucggacuucuaauaccacaauuacugccaacaccuccgacgcauaucucaaugcuucagaaacaaccacuuuaagucccagcgguuccgccguuauaucuacgacaaccaucgcgacuaccccgagcaaaccuacaugcgaugagaaguacgccaacauuaccguggacuaucuguacaauaaagagacuaaacuuuucacagcaaaguugaacgucaaugaaaacguggagugugggaauaacacgugcaccaacaaugaaguacauaaccugacugaguguaagaaugcuucaguuaguaucucccacaacagcugcacagcccccgauaagacccuaauucucgacgugccaccuggagucgagaaauuucaacugcacgacuguacacagguggaaaaggcugauacuaccaucugccuuaaauggaagaauauagagacguucaccugugacacacagaacaucacuuaucgcuuucagugcggcaauaugauuuucgauaacaaggaaaucaaacuggagaauuuggaacccgagcaugaguacaagugugacucugaaauucucuauaacaaucacaaauucaccaacgccucaaagaucauaaaaacagauuuuggcaguccaggggagccccaaauuaucuucugccgaagcgaagcagcccaucagggagugauuacuuggaauccuccacagcguuccuuucacaacuucacccuguguuacaucaaggagacggaaaaagacugcuuaaaucuggauaagaaccucaucaaguacgaccuucagaaccugaaaccguauacaaaguacgucuugucucuacacgcuuauauuauagcgaaaguucaaagaaaugguucggcagccaugugccauuuuaccacuaagagcgcucccccuucccagguguggaacaugacaguaucaaugaccagugauaauucuaugcacgugaaauguaggccaccccgggaccgcaacggcccucaugagagauaccaccuggaggucgaagccgggaauacucucgugaggaacgagagccauaagaauugcgauuuccggguuaaggaccugcaguauuccaccgacuacacauuuaaagcauauuuccacaacggagauuacccaggcgaacccuuuauccuucaccauucaacgagcuacaauucuaaggcccugauugcuuucuuggccuuucucaucauagugaccuccauugcacuguuagucgugcuguauaaaaucuacgaccuacacaagaaacgcaguuguaaccucgaugagcaacaggaacugguagagcgagacgaugagaagcagcuuaugaauguugaaccgauccaugcggacauuuugcuggagacuuauaagagaaaaaucgcugaugaagguaggcuuuuccuggccgaguuucagagcauuccucggguguucucuaaguucccaauaaaagaggcacguaagcccuuuaaccaaaauaaaaaccgcuacgucgacauccuuccuuaugauuacaauagaguggaacuguccgagauuaacggggacgccggaucaaacuauaucaaugcuaguuacaucgauggcuucaaggaacccaggaaguacauugccgcacagggcccacgggacgagacagucgaugacuuuuggcgaaugauaugggaacagaaagcuaccgugaucguuauggugacacgcugcgaggaggggaacagaaauaagugugccgaauauuggccuagcauggaggaaggaacuagggcguucggugacguagucgugaaaauuaaccagcacaagcggugccccgauuacaucauucaaaaauugaauaucguuaacaagaaagagaaggccaccggccgcgaagugacgcacauacaguuuacaucguggccagaccauggggucccggaggauccucaccuccuguuaaagcugagaaggcgugugaaugcuuucuccaacuuuuucucuggacccaucguagugcauuguagcgcaggcguuggucggaccgggacuuauauuggcaucgacgccaugcuagagggacucgaagcugagaauaaagucgauguguacggcuauguggucaagcugcgaagacagaggugccuuaugguucagguggaagcccaauacauuuugauccaccaggcacugguggaguauaaccaguuuggggaaaccgagguaaaucucucagagcugcauccauacuuacacaacaugaaaaagcgcgaucccccuagugaaccaucaccccuggaggcggaguuccagcggcuuccuucuuacagaagcuggaggacacaacacauaggaaaucaggaagagaacaaauccaagaaucgcaacucaaacgucauuccguaugacuacaaucgagugccauugaagcaugaacucgagaugagcaaagaaagugagcacgacucugaugaauccagcgacgaugacucggauucagaggagcccucuaaguauaucaacgccaguuuuauuauguccuacuggaaaccugaaguuaugaucgcugcccaggguccacugaaggagacuauaggcgacuucuggcaaaugaucuuucagcggaaagugaaggucauugugaugcuaaccgaacugaagcauggggaccaggagaucugugcacaguauuggggagaaggcaaacaaacauacggugauauugagguugaccucaaggauacggacaaaagcucuaccuauacucugcguguguucgagcuuagacacagcaagaggaaagauucccgcacaguauaccaguaccaguauaccaauuggucagucgaacaguugcccgcugagccuaaggaacugaucaguaugauacaaguggugaagcagaaauuaccgcagaagaacagcucugaggggaauaaacaucacaaguccacuccccuccugauucacugccgggacggcucacagcaaacaggaaucuucugugcccuucugaacuugcucgaaagugcagagaccgaggaagucguugauaucuuucaggugguaaaagcccugagaaaggcuaggccaggcauggugagcacguucgagcaguaccaauuucuauaugacgucauugcguccacuuacccugcccagaauggacaggugaaaaagaacaaucaucaggaagauaagaucgaguucgacaacgagguugauaaagugaagcaagacgcaaauugcgucaacccccugggggcuccagaaaaacucccugaggccaaggaacaggccgaggguucugaacccaccucgggcacagaggggccagagcacagcgugaauggaccggcuuccccugcacugaaccagggcuccuga

SEQ ID NO: 2437 - RNA, 624 nt, Artificial Sequence
  AAH02977 variant
auggccaagaccuacgacuaucuguucaaacuccuucugaucggcgauaguggggugggaaagacaugcgucuuguuuagauucuccgaggacgcuuuuaacucuacuuucauuucaacgauagguaucgauuuuaaaauuaggaccaucgaauuagacggcaagcggauuaaacugcagaucugggauacagcagggcaagagcgcuuccgaacuauaaccacagccuacuaucguggagcgaugggcaucaugcuaguuuacgacauuaccaaugaaaagaguuuugauaacaucagaaauuggauuaggaacaucgaggaacacgcuagcgccgacguggagaagaugauacucgguaauaaaugugauguaaacgacaagcggcaaguguccaaagagcgcggggaaaagcuggcacuugauuauggaauuaaauucauggagacuucugccaaggcuaauaucaacgucgaaaaugcauuuuucacacuggccagagacauuaaggcuaaaauggauaagaaauuggagggcaacucgccccagggcucaaaucagggggugaagaucaccccugaccagcagaaaaggagcagcuuuuuccggugcguucuccuguga

SEQ ID NO: 2438 - RNA, 1260 nt, Artificial Sequence
  BAA81688 variant
augaagaacuacaaagccaucggcaagauuggggagggaaccuucagcgaagugaugaaaaugcagucccugagagacgguaauuauuacgcuugcaagcaaaugaaacagagguuugagucuauagaacaggucaacaaucuccgggagauccaggcacuucgccgacugaacccccacccuaauauuuugauguuacaugaaguuguguucgaucguaagucaggcagucuggcccuaaucugugagcucauggacaugaacauuuaugagcugaucagagggaggcgguacccacuuagcgaaaagaaaauaaugcacuauauguaccaacugugcaaguccuuggaucauauccaccgcaauggaauuuuucauagagacguaaaaccggagaacauccucauuaagcaggaugugcugaaacugggcgacuucgguucuuguaggucggucuauucaaagcagcccuacacagaauacaucagcacucggugguaucgcgcgccugagugccucuuaacggauggguuuuacaccuauaagauggaccuguggagugcuggauguguguucuacgagauagccucccuucagccauuguuucccggcguuaaugaacuggaucaaauuucuaaaauccacgacgugauuggcacuccugcacagaagauccuaacaaaauucaagcagagccgagccaugaacuuugauuucccauuuaaaaagggguccggaaucccccuccugaccacaaaucuuucaccucagugccugaguuugcuccacgcuauggucgcauaugacccagaugagagaauugccgcucaucaagcccugcagcacccguacuuccaggaacaaaggaaaaccgagaagcgggcguuagguagccaucguaaggcaggcuuucccgaacacccuguggccccagagccccugucuaacuccugucagauaucaaaagaggggcgcaagcagaaacagagccucaagcaagaagaggacagaccuaaaaggcggggaccagcuuauguaauggaacuucccaagcugaaguugaguggcguugugcgacuaucuuccuacagcucgccgacucugcagucuguccucgguuccgggacaaauggacgcgugccugugcugagaccccuuaaaugcaucccagccucaaagaaaaccgacccucagaaggaucugaaacccgcaccacagcaauguagguugcccacgauuguccggaagggcggccgcuga

SEQ ID NO: 2439 - RNA, 1389 nt, Artificial Sequence
  AAH08727 variant
auggccagcaacuccucuucaugccccaccccuggcgggggacaccugaaugguuacccagugccgcccuaugcuuucuuuuucccuccaaugcucggcgggcuuagucccccuggagcacugacaacuuugcagcaucaauuaccagucagcggcuacuccacgcccucuccugccaccaucgagacacagucgucaagcagugaggagauuguuccauccccgcccucuccuccaccccugccuagaauauauaagccauguuuugugugccaggacaaaagcuccgguuaccacuaugggguaucagcgugugaaggaugcaagggcuucuuuaggcggaguauccagaaaaacaugguguacacuugucaucgcgauaagaauugcauuaucaacaaagucacccgaaaucguugucaauauugcagacuacagaaguguuucgaggugggcaugagcaaggaaucuguuaggaacgaccggaauaaaaagaaaaaggaggugcccaaaccggagugcuccgaaucauacacacucaccccugaggucggggaacugauugagaaggugcgcaaggcucaccaggagacuuuucccgcccuuugucagcugggaaaauacacaaccaacaauagcagugaacaaagaguaucuuuggauaucgaccucugggauaaguucuccgagcugagcacgaaaugcauaaucaagacuguugaauuugcaaaacagcugccagguuucaccacacucacuauugccgaccagaucaccuuacugaaggcugcaugccuugauauuuugauccugaggauauguacacgguauaccccugagcaggacacgaugacuuuuucggauggccuaacacucaaccgcacccaaaugcauaaugccggguucggaccccugacugaccuuguguuugcuuucgccaaccagcuguugccacucgaaauggaugacgcggagacaggccuguuaucugcaauuugccugaucuguggugaucgacaggaccucgagcaacccgacagagucgauaugcuucaggaaccucuguuggaggcccuaaaaguguacgugaggaagcggcguccaucccgcccgcacauguuccccaagaugcugaugaaaauuaccgaccucagaucaaucagugcuaagggggccgaaagggucaucacgcugaaaauggagauuccuggaagcaugccaccccuuauacaggaaaugcuggaaaauuccgagggcuuggauacccucucuggccagccugggggagguggccgggacgggggaggccuggcaccacccccggguagcugcucaccuaguuuauccccaagcucuaaccgaucaagucccgcuacacacagcccuuga

SEQ ID NO: 2440 - RNA, 570 nt, Artificial Sequence
  AAB02605 variant
augaccgaguacaagcugguggucguuggcgccgggggaguggguaaaagcgcucucacaauccagcuuauucaaaaccacuucguagacgaauaugaucccacuauagaggacuccuacagaaaacagguggucaucgauggcgaaacgugccuguuggacauuuuagauaccgcagggcaggaggaauauucugccaugagggaccaguacaugcggacaggagagggcuuucuguguguguucgcgaucaauaacacuaagucauuugaggauauucaucaauaucgcgaacagaucaagcgaguuaaagacagugaugacgugccuaugguccuaguggguaauaagugcgaucucgcugcccguaccguagagagcagacaggcacaggaccuggccagguccuacgggauaccauauaucgaaacaucugcuaagacccggcaaggaguugaggaugcauucuacacucuugugcgcgagauuagacagcacaaacugaggaaguugaacccgcccgacgaaucgggcccuggcuguaugucaugcaaauguguccucagcuga

SEQ ID NO: 2441 - RNA, 570 nt, Artificial Sequence
  AAB59445 variant
augaccgaguacaagcugguggucguuggcgccgggggaguggguaaaagcgcucucacaauccagcuuauucaaaaccacuucguagacgaauaugaucccacuauagaggacuccuacagaaaacagguggucaucgauggcgaaacgugccuguuggacauuuuagauaccgcagggcaggaggaauauucugccaugagggaccaguacaugcggacaggagagggcuuucuguguguguucgcgaucaauaacacuaagucauuugaggauauucaucacuaucgcgaacaaaucaagcgaguuaaagacagugaggaugugccuaugguccuaguggguaauaagugcgaccucccaagccguaccguagauacaaagcaggcucaggaccuggccagauccuacgggauaccguucaucgaaaccucugcaaaaacuaggcagcggguugaggaugccuuuuauacacuugugcgcgagauuagacaauacaggcugaagaaaaucucgaaggaagagaaaacccccggaugugucaagauuaagaaaugcaucauaauguga

SEQ ID NO: 2442 - RNA, 570 nt, Artificial Sequence
  AAA60255 variant
augaccgaguacaagcugguggucguuggcgccgggggaguggguaaaagcgcucucacaauccagcuuauucaaaaccacuucguagacgaauaugaucccacuauagaggacuccuacagaaaacagguggucaucgauggcgaaacgugccuguuggacauuuuagauaccgcagggcaggaggaauauucugccaugagggaccaguacaugcggacaggagagggcuuucuguguguguucgcgaucaauaacucaaagaguuuugcugauauuaaucuauaucgcgagcaaaucaagcgaguuaaagacagcgaugacgugccuaugguccucguggguaacaagugcgaucugccaacucguaccguagacacaaagcaggcccaugaacuugcaaaauccuacgggauaccguucaucgagaccucugccaagacuagacagggaguugaagaugcuuuuuauacacuggugagggagauucggcaguaccgcaugaaaaagcucaauucgucagacgacggcacccaaggcuguaugggguugcccugcgucgugauguga

SEQ ID NO: 2443 - RNA, 546 nt, Artificial Sequence
  AAB84001 variant
augugcaagggccuggccgcucucccccacagcugucuugagagagcaaaagaaaucaagauuaaacuggggauauuguuacagaagccugacuccgugggagaucuggucaucccauacaacgagaaaccggaaaagcccgccaagacccagaaaacaucucuagacgaggcgcuccaauggagggauucacuggacaaacuucugcagaauaacuaugguuuggcuaguuucaagagcuuucucaaguccgaguucucugaagagaaucuggaauuuuggauugccugcgaggauuacaaaaagaucaagucgccugcaaaaauggccgaaaaggcuaaacagauuuaugaggaguucauccaaacugaagcaccaaaggagguuaacauagaccauuuuacgaaagauaucaccaugaagaaucugguggaacccucacucagcaguuucgacauggcccagaaacggauucacgcuuuaauggagaaggauucccugccucgcuuuguacgaucugaguucuaccaggaacuuaucaaguga

SEQ ID NO: 2444 - RNA, 2175 nt, Artificial Sequence
  CCDS4362.1 variant
augagcuuccccaaggccccucugaaaagauuuaacgacccauccggcugcgcuccgucucccggggcauacgaugugaagacccucgagguccuuaaaggaccuguuucauuccagaagagucaaagguuuaaacagcagaaggaaagcaagcagaaucugaacguggacaaagauacaacuuugccagccuccgcgcggaagguaaaaucuucggagucaaaggaaagccaaaagaaugacaaggauuuaaagauccuggagaaagaaauucgcgugcuacuccaggagcgaggugcucaggaccguagaauacaggaucuggagacggaacuugagaagauggaagccaggcugaacgcagccuugcgggagaaaaccagucucuccgcuaauaacgcaacacuggagaagcaacugaucgaacucacucgcaccaaugaguuacugaaaucuaaguucagcgaaaacggcaaucagaaaaaccuuagaauuuugucccuggagcuaaugaagcucaggaauaagcgggaaacaaaaaugcgcgggaugauggccaagcaggagggaauggagaugaaacugcaggucacccaacgaucacuugaagagagucagggcaagaucgcucagcuggaagguaaauuggugagcauugagaaggaaaagaucgacgagaaaucugagacugaaaagcuccuggaguauauagaagagaucuccugugccucagaucaaguugaaaaauacaaguuagacauugcgcagcuggaggagaaccucaaagaaaagaaugaugagauccuuagccugaagcagaguuuggaagagaacauugugauccuaucuaaacaggucgaggaccugaaugugaagugccaacuccuggaaaaagagaaggaagaucacguaaacagaaacagggagcauaaugaaaaccuuaaugcagagaugcagaaccugaaacagaaguuuauauuggagcagcaagaacgggagaagcuccagcagaaagaacugcagauugacuccuuacugcaacaggagaaggaacuaagcucgucucuccaccagaaacuguguuccuuccaggaggagaugguuaaggagaaaaaucuuuuugaagaagaguugaagcaaacacuggacgaacucgauaaacugcagcagaaggaggagcaagccgaacgucuugugaagcagcuggaggaagaggcuaaaucacgcgccgaggaauugaagcuccuggaggaaaaauuaaaggggaaagaggcagaacuggagaagaguagcgcugcccauacccaggcgacgcuacuccugcaggagaaguaugacuccaugguccaaucucuugaagaugugacugcccaguucgagagcuacaaagcauugaccgcuucagaaaucgaggaccugaagcucgaaaacaguucccugcaggagaaagccgcuaaggccggcaaaaaugcagaggaugugcagcaccaaauuuuagccacagaaagcucuaaccaggaguaugucagaaugcugcuugacuugcagacuaagucagcucucaaggaaaccgagaucaaagaaaucacaguuaguuuucugcagaagauuaccgaucuacaaaaucagcugaaacagcaagaggaggacuucaggaagcagcucgaagaugaggaaggacggaaagcggagaaggagaacacgacugcagaacugacagaggaaauaaauaaguggcgacuuuuguacgaggaacuguauaacaaaaccaagcccuuucaguuacagcucgacgccuucgagguggagaaacaagcucugcuuaaugaacauggcgccgcacaggagcagcugaacaagauccgcgauagcuacgccaaauugcucgggcaccagaaucugaagcagaaaauuaagcacguagugaagcuaaaagacgaaaacucccaacugaagucugaggucucgaaacucagaugccagcuggcuaagaaaaagcagagcgaaacuaaacuucaagaggaguugaacaaagugcugggaaucaagcauuuugacccuuccaaagccuuccaccaugaaucaaaggagaauuucgcauuaaaaacaccacucaaggaagguaacaccaauuguuacagggcgcccauggagugccaggaaaguuggaaguga

SEQ ID NO: 2445 - RNA, 582 nt, Artificial Sequence
  AAC33179 variant
auggccgcuaucagaaagaaacuggugauugucggcgacggggcaugcggaaagaccugucuccuuauaguuuucagcaaagaucaguuucccgagguguacguaccuacaguguucgaaaacuauaucgccgacauugaggucgaugguaagcaaguggaacuggcguugugggacacugcuggccaggaggauuacgacagguuacggccacuguccuauccggauacggacguuauccuaaugugcuuuucuauugauucacccgacagucucgaaaauaucccugagaaauggaccccagaggugaagcacuucugucccaacgucccuauaauccugguggggaauaagaaagaucuucgccaggacgaacauacacgacgugagcuggccaagaugaaacaggaaccaguaagaagcgaggagggaagggauauggcaaaccggauuuccgccuuuggcuacuuggaaugcucugcuaagacuaaagaggguguucgcgaaguguucgagauggcaaccagagccgggcuccaagucaggaagaauaagcggcgccgaggaugucccauccuguga

SEQ ID NO: 2446 - RNA, 888 nt, Artificial Sequence
  AAA36161 variant
augagcggcgcccuggacgugcuccagaugaaggaggaagauguccuuaaauuccuggcugcagggacccacuugggagguacaaacuuagacuuucaaauggagcaguacaucuauaagagaaaauccgauggcauuuacauaaucaaucugaagaggacuugggaaaaacuacuccuggccgcgcgggcuauuguugccaucgagaaccccgcagacgugucuguaauuucaagucgcaauacggggcagcgagccgugcuuaaguucgcugcagccaccggagcuacaccuaucgccggccguuuuacuccagguaccuucacaaaccagauacaagcggcauuuagagaaccgaggcuguuggucgugaccgauccccgggccgaccaucagccucucacugaggcuagcuauguuaaucugccaacaaucgcccugugcaacaccgauucuccccuccgcuacguggacauugcaaucccuuguaauaacaagggggcucacuccgucggauuaaugugguggaugcuggccagagaggugcuuaggaugcggggcacgauuucgcgcgaacauccaugggagguaaugcccgauuuguauuucuaccgagacccugaagagaucgagaaagaggaacaggcggccgcagaaaaggcuguuacuaaagaggaauuucagggcgaguggaccgccccagcuccggaguucacagccacucaacccgaaguggcagauuggucagaggggguccaggugccuagcgugccaauacagcaguuucccaccgaagacuggagugcccaaccugcuacagaggauugguccgcggcaccaaccgcccaggcuacggaaugggucggagccacuacagacuggucuuga

SEQ ID NO: 2447 - RNA, 2601 nt, Artificial Sequence
  AAH14614 variant
augaacggcgagcagcaacuggacgccgaugcugggagcggaauggaagagguggaacucuccugggaggacuaccuugaagagaccgguucuacagcaguccccuauggcucauucaagcacguugauacuagacugcagaauggguuugccccuggaaugaaauuggagguggcgguaaggacggacccagaaaccuacuggguggcuacagucaucacuaccugcgagcaguuacugcuacuccgguaugauggcuacggugaagaccgccgagccgauuucuggugugacauucguaaggcagaucuguauccgauaggguggugcgagcagaacaaaaagacacuugaggcccccgaaggaaucagagacaaagugagugauugggacgaguuucugaggcaaaccuugauuggcgcuuguagcccuccaguuccccuccuggaaggccugcggaaugggcgcaacccucucgauuuaaucgcaccaggauccagacuggagugccaggccuuccaggacucucuuucgacuuggauugugacagucguggaaaauaucgguggcagguugaagcugcgguacgaggggcuagagucaagcgacaacuaugaacauuggcucuacuaccuggaucccuuucuucaccauguaggaugggcugcccagcaaggcuaugagcugcagccuccaagugcgauacgccacuugaagaaugaagcagaguggcaggaaauccucgccaaaguuaaggaggaggaagaggaaccgcugcccuccuacuuauucaaagacaaacaggugauugguauccauaccuuuucugucaacaugaagcuggaggcuguggauccuuggagcccauucgggauuucccccgccacgguggucaagguuuuugacgaaaaguauuuccucguggagauggaugaccuucgaccugagaaucacgcaagaaggucauuuguaugucacgcugauaguccaggaaucuuccccgugcaauggagccugaaaaacggcuugcauauaucuccgccucccggcuacccaucccaggacuuugauugggccgacuaucuaaagcagugcggggcggaagccgcaccucaacgguguuuucccccacugauuucagagcacgaguucaaagaaaauaugaagcucgaggcugucaaccccauccugccugaagaggugugcguugccacuauuaccgcugugcguggaagcuaccuuuggcugcaguuggaagguaguaaaaagccaaucccggaguguaucgucucuguggaauccauggauauuuucccccucggcuggugcgagacaaaugggcauccucugagcacuccacgcagagccaggguauauaaacagcggaagauagcaguugugcagcccgagaagcaagucccuucgucucgaaccgugcacgaaggauuacgcaaccaggagcuuaauuccacagaaucagucaugaucaacggcaaauacuguugcccaaagauuuacuucaaccacagaugcuuuaguggucccuaucuaaauaaagggaggaucgccgagcucccgcagugugugggcccuggaaacugcguucuggugcuucgggaaguauugacccugcucauaaaugcugcguacaagccaagccgcguccugagagagcuucagcuggacaaagacuccguguggcauggcuguggggagguuuugaaggcaaaguauaaaggaaagucuuacagggccacgguggaaauugucaaaacugcugaucgugugacagaguucugccggcaaaccuguaucaagcucgaaugcugucccaaccuguuugguccucgaaugguauuagacaaaugcagcgagaauuguucagugcugacuaagacaaaguauacccacuacuauggcaaaaagaaaaacaagagaaucgggaggcccccaggaggccauaguaaucuagccugcgcacucaaaaaggccuccaagcgccggaaaagaaggaagaacguuuucguccacaaaaagaaacgcagcucugcuucaguggauaauacgccugccgguaguccccaggggagcggcggagaagacgaggaugacccagaugagggcgacgaugacucccugucugaagggucgaccagcgagcagcaggaugaacuucaagaggaguccgaaaugucagagaagaaaaguuguucuagcuccccgacacagucagaaauuagcacuucuuugccucccgaccgacagcggcguaagagagagcugaggaccuuuuccuucagugaugacgaaaacaagccacccagcccuaaagagauccgcauugagguggcagaacggcuccaucuggacucuaauccauuaaagugguccgucgcggauguugugagauuuauaaggucaacagacugcgcuccccuggcccgaaucuuccuugaucaggagauugacggacaagcauugcuccugcuaacucugccuaccgugcaggaaugcauggaucucaaacuggguccggccaucaagcugugucaccacaucgagcgcauuaaauuugcuuucuacgaacaguuugccaacuga

SEQ ID NO: 2448 - RNA, 1431 nt, Artificial Sequence
  CCDS4550.1 variant
augagcggcuccucugccagaucaagucaccugagccagcccguggucaaguccguucucguguacaggaacggggacccuuucuaugcuggacggcgcguagugauccaugagaaaaaggucucuucguuugaaguguuccuuaaagagguuaccgguggcgugcaagcaccauuuggggccguccgaaauauuuacacaccgcguacuggacacagaauaaggaagcuggaucagauccagucaggcgguaacuauguggcugggggacaggaagcguucaaaaaguugaauuacuuagacauuggcgagaucaagaaacggcccauggaaguaguuaacacggaggugaagccugucauucauagccgcaucaaugugagugccagauuuaggaaaccacugcaagagcccugcaccauauuccuaaucgcaaacggcgaucucauuaauccugccucccggcugcuuaucccacgcaagacacugaaccagugggaccacguguugcagauggucacugaaaagauuacccuccgaucuggggcuguucauagacuguauacacuggagggaaagcucguggaaagcggugcagaguuagagaauggccaguuuuacguagccguggggagggauaaguucaaaaagcugcccuauuccgaacuuuuguuugacaaaucaaccaugcggcguccuuucggacaaaaggcuaguagccugccaccgaucgucggcucucgcaaauccaaggguucagggaacgauagacacagcaaaaguacugugggaucuuccgacaauagcucgccccagccucuaaagaggaagggcaaaaaggaggauguuaacucugaaaaacucacaaagcugaaacagaaugugaaacuuaagaacucccaggagaccauaccaaauucagacgaaggcauuuuuaaagccggggcggagcggagugagacgcgaggagcagccgaaguccaagaggaugaagacacucagguggagguacccguugaucagcgcccugcugaaaucguggacgaggaggaagacggugagaaggccaacaaagaugcagaacaaaaggaggacuucagcggcaugaacggggaucuggaagaggagggaggcagagaagcuaccgacgccccagagcaggucgaagagauuuuggaucacuccgagcagcaggcgaggcccgcccgggugaauggugggacagacgaagagaacggcgaggaacuccaacaggucaauaacgaacugcaguuagugcuggauaaagagcgcaagucucagggagcaggcagcgggcaagacgaggcugauguugacccgcagagaccucccaggccagaagugaagaucacuucaccugaggaaaaugagaacaaucagcagaacaaagauuacgccgcuguagccuga

SEQ ID NO: 2449 - RNA, 1362 nt, Artificial Sequence
  BAA07903 variant
augagaauccccguggacgccagcaccuccaggcgguucacaccuccaucuacugcucugucaccgggcaagaugagugaggcacucccccuuggggccccugaugcgggagcugcccuggcagguaaauugcgcagcggcgaccgauccauggucgaaguuuuagccgaucacccaggggagcuggugcguacggacucucccaacuuucuaugcucgguacucccuacccauuggagauguaauaagacacugccaauugcuuucaaaguggucgcacuuggagaugugcccgacggcacucugguuaccgugauggccgguaacgaugaaaauuacucagcugaguugaggaacgccacagcggcaaugaagaaucaggucgcccgguuuaacgaccuccgcuucguggggagaagcggaaggggcaaaaguuuuacccugacuauaacaguauucaccaauccuccacaaguugcuacguaucaccgggccaucaagauuacuguggauggcccgcgcgaaccccgaagacauaggcagaagcuggacgaucagaccaaaccugggucccucucuuuuagcgagcgguuauccgagcuggaacagcuucgucgcacagcaaugagagucucaccacaccaucccgcuccuacuccaaaccccagggccaguuugaaucacagcaccgcguucaacccgcaaccucagucucagaugcaggacacacggcaaauccagcccuccccaccuuggucauacgaucagagcuaucaguaccugggaaguauugccucucccuccgugcacccagcaacccccaucagcccuggucgagcuucgggcaugacgacucuaucugccgagcucuccucacgccugaguacagcuccagaccuuaccgccuuuagcgacccgagacaauuccccgcacugccuuccauaucugauccaaggaugcauuaucccggggccuuuacuuacagcccuacaccagugaccucaggaaucggcauugguaugagugcuaugggguccgcgacgcgguaucacaccuacuugcccccgccuuacccaggaagcucucaggcacagggcggccccuuccaagccucaaguccuagcuaucaucucuacuauggggcuuccgccggaucuuaccaguuuucgauggucgguggcgaacgcagcccacccagaauccugccucccugcacaaaugcauccacugggucagccuuacugaacccaagucucccgaaucagucugacguuguggaggcugagggaagccacuccaacucaccuaccaauauggcccccagcgcaaggcuugaagaggcgguauggcguccauauuga

SEQ ID NO: 2450 - RNA, 1080 nt, Artificial Sequence
  ACI46041 variant
augccccuggagcucgaacuuugcccuggcagaugggucgggggacagcacccauguuucaucauugccgagauaggucaaaaccaucagggcgaccuggauguggcuaagaggaugauccggauggcaaaagaaugcggggccgacugugcgaaguuucagaaaagcgaguuggaauuuaaguuuaaucgcaaggcuuuagagcgaccguacaccuccaagcacucuuggggaaagacauauggcgagcauaaacgucaccuggaguucucacaugaucaguacagagagcuacaaagguaugccgaagagguugguauuuucuucacugcaagugggauggacgagauggccguggaauuucuccacgagcugaacguacccuucuuuaaggugggaagcggcgauacgaauaacuucccuuaccuugagaaaaccgcuaagaaaggccggccaauggucaucuccucugggaugcagucgauggacacaaugaaacagguguaucagauuguuaagccccugaauccuaacuuuugcuucuugcaauguacuucagcauacccacuccagcccgaagaugugaaucugcgcgucaucagcgaauaucagaaacuguuuccugacauaccaaucggauacaguggucacgagaccggcauugccaucuccguggcugccguagcgcucggggcaaagguuuuagagagacauauuacacuggauaaaaccuggaagggaucugaccacagcgccucccuugaaccgggcgaguuggcugaacuggugaggucaguccggcuaguggagcgcgcccucgguagucccacuaaacagcugcuuccuugcgaaauggcauguaacgagaagcuggggaaaagcguggucgcuaagguuaagaucccagagggaacaauauugaccauggauaugcucacggugaaaguaggcgaacccaaggccuacccuccagaggacauuuucaaucuggugggcaaaaaggucuuagugacuguugaagaggaugacaccaucauggaagaacugguggacaaccaugggaaaaagauuaagucuuga

SEQ ID NO: 2451 - RNA, 2715 nt, Artificial Sequence
  CCDS14652.1 variant
augcaggccagcccccugcaaaccucccagccuacaccaccggaggaacuccacgcugcagccuacguguucacuaacgacggccagcagaugagaucugaugaggucaaucuuguugcgacggggcaucaaucaaagaaaaagcacaguaggaaaagcaagcggcauuccucuucgaaacgccgaaagucaaugagcaguuggcuggacaagcaggaagaugcugccgugacccacuccaucugcgaggaacguauuaacaauggacagcccguagcagacaacguguugucuacagccccuccauggcccgaugcuacuauagcacauaauaucagagaggagaggauggaaaacggucagagccggaccgacaaagucuuauccacagccccuccacaacuggugcacauggcugccgcgggcauucccucaaugaguacccgcgaucuacacagcacuguuacacauaauaucagagaggaaaggauggagaacgggcagccucagccagacaaugugcucucuaccggaccgacgggccugauuaacauggcagccacucccaucccugcuauguccgcccgggaucuuuaugcaaccgucacacacaaugugugugagcagaagauggaaaacguacaaccagcucccgacaauguucuguugacucuccgcccucgaagaauaaacaugaccgauacagguaucucaccaaugagcaccagggaccccuacgccacgauuacuuauaaugugccggaggagaaaauggagaaggggcagccucagcccgauaacauccugaguacagcgucuaccggacugauuaacgucgccggcgcaggcacuccagcuaucuccacaaaugggcucuacagcaccgugccucauaacgugugcgaagagaaaauggagaaugaccaaccccagccaaacaaugucuuaucgacgguucagcccgugauaauuuaucugaccgccacaggaaucccugguaugaacacucgggaccaguacgcuaccauuacacacaauguaugugaagaacguguggucaacaaucaaccacuuccgucuaacgccuuguccacugugcugcccggccuagcauaucucgccaccgcugauaugccugcgaugucaacacgcgaccagcacgcaaccaucauccauaaucugagagaagagaagaaggauaacagucagccaacucccgacaauguucuuagcgccgugacgccugaacugauuaacuuggcuggggccggaauaccacccauguccacaagggaucaguacgcaaccgucaaucaccaugugcacgaggcccggauggagaacggccaacgaaaacaggacaacguacucucuaauguucugagcgguuuaaucaacauggcuggggccucaauuccggcaaugaguucccgcgaucuguacgcgacuaucacccauagcgugagagaagagaagauggaaucuggaaaaccucagacagacaaggucauaucaaaugaugcuccacagcucggccacauggccgcaggcgggauucccaguaugagcaccaaagaccuuuaugccacugugacacaaaacguccacgaggaaaggauggagaauaaccagccucagcccuccuacgaucugucuacgguguugccaggacuaaccuaucugacuguugcugguaucccugccaugucgacacgggaccaguacgcaaccgugacacauaauguacacgaggaaaagaucaaaaacggccaagcugccagcgacaaugucuuuuccacugugcccccagcguucauuaacauggccgcuaccgggguuucaaguaugucuacgcgcgaucaguaugcagccgugacccauaauaucagagaggaaaagauuaacaauagccagccggcuccuggaaacauacucuccacagcacccccauggcugaggcacauggccgcggccggcaucucaagcacuauuacccgugaccuuuacgucacagcuacucacucugugcaugaggagaagaugaccaauggucaacaggcccccgauaacucccugaguacgguaccuccagggugcaucaacuugagcggcgcaggaaucucuugucgguccacacgagaccucuaugcuaccgugauucacgauauacaggaagaggaaauggagaaugaccagacucccccugauggcuuucugucaaacagugacagcccggaauuaaucaauaugacagggcauugcaugccacccaacgcccuggauucguucucccacgacuuuaccucucuaagcaaagaugagcuccuguacaagccugacucaaaugaguucgcaguuggaacuaaaaacuacagugucuccgccggugauccacccgugaccgugaugucucuugucgaaacaguuccuaauacgccgcaaauuagccccgcuauggcgaagaaaaucaacgacgacauuaaguaucaguugaugaaggaggugagaagguuuggccagaauuacgaacgcaucuucauacugcucgaggaagugcagggguccaugaaaguaaagcggcaauuugucgaguucaccaucaaagaggccgcaagauuuaagaaagugguucugauucagcagcuugaaaaggcucugaaggagaucgauucacauugucacuugaggaaagugaagcacaugcgcaaacgauga

SEQ ID NO: 2452 - RNA, 2403 nt, Artificial Sequence
  AAH01058 variant
augggcagcuccaagaaacacagaggggagaaggaagccgcuggaaccacagcagccgcggguacuggcggggcuacggagcagcccccuaggcaucgggaacacaaaaagcauaaacaccgcucuggaggcucaggugggaguggaggcgagcgacguaagagaagcagggaacggggcggggagcgcggauccgguagaaggggcgccgaggcagaagcccggucuucgacccaugggcgcgagcgaucacaagcugaaccaagcgagagaagggugaagcgggagaaacgugacgauggauacgaagcagccgcuaguuccaagacaucuagcggcgacgccuccucacugaguaucgaggaaacuaacaaacuccgcgcgaaacuuggucugaaaccguuggaggucaaugcaauuaagaaggaagccgggaccaaagaggagcccguuacagcugaugugauaaacccuauggccuuaagacagagggaagaacugcgggaaaagcuagcagcugccaaagagaagcgacuccugaaucagaaacuuggaaagaucaaaacccugggcgaagacgauccaugguuggacgauacugcggccuggauugagcgcagcagacagcuccaaaaggagaaggaccuggcagaaaagagggcuaagcugcucgaggaaauggaucaggaguucggcguaucuacauuaguggaagaggaguuugggcagcggcgccaggaccuguauuccgccagagaucuucaaggauugaccgucgaacacgcuaucgacucauucagggagggugaaacgaugauucugacucuaaaagauaagggcgugcuccaggaggaggaagacguucuggugaacgucaaucuuguggacaaagagcgugccgaaaagaacguagagcugcggaagaaaaagcccgauuacuugccuuaugcagaagacgagagcguugaugaccucgcccagcagaaaccacgaaguauccugucuaaguacgaugaggaauuagagggggaaagaccccacuccuuuaggcuggagcaaggaggcaccgcugacggucuccgcgaacgggagcuugaggaaauaagagcgaaacugagguugcaggcacagagccuaucgacaguggggccucgccuggccucugaguaucucacuccagaagagauggucaccuucaagaagacaaaacgacgggugaagaaaauccguaagaaagaaaaggagguggucguuagagcugaugaccugcuuccgcugggcgaucaaacccaggacggagauuuuggcuccagguugcgcgggcggggaagaaggcgagugucagagguagaagaggaaaaggagcccgugccucagccacuccccagugacgacacgcgcgucgagaauauggauauuagcgacgaagaggaagguggcgccccuccacccggguccccucaggugcuggaggaagaugaggcagaguuagaacugcaaaaacagcuagagaagggacggagacucaggcagcugcagcaacuucagcaguugcgugacucuggcgaaaaaguuguggagaucgucaagaaacuggaaagccgccagcgggguugggaggaggaugaagacccggagagaaagggggccauuguguucaacgcuacuucagaauuuugcaggacacucggcgagauccccaccuacggacuggccggcaaucgagaagaacaagaggaacuuauggauuucgagcgggacgaggagcgcagugcaaacgggggauccgagagcgauggugaagagaauauaggcuggucuacuguaaaccuggacgaagagaaacagcagcaggauuuuucagcgaguagcacaaccauuuuggacgaggagccaaucguuaauagagggcucgcugccgcacuguuacugugucaaaacaagggacuacucgagacgaccgugcagaaggucgccagggugaaagcuccuaauaagucccugcccucugccgucuauugcauugaagauaaaauggcaaucgacgacaaguacucgcggcgagaggaauacagaggcuucacacaggauuuuaaagagaaggacgguuauaagccagaugugaaaaucgaauacguugacgagacugggcgcaaacuuacccccaaggaggcuuucaggcaauugagccaucguuuucacggcaagggauccggcaaaaugaagacagaacggagaaugaagaaacuggaugaggaagcccuccugaagaaaaugucaaguucugacacuccuuuagggaccguggcgcugcuucaggagaagcagaaagcccagaagacaccauauauuguauugagcggauccggcaagucaaugaacgcuaacaccauaacuaaauga

SEQ ID NO: 2453 - RNA, 2877 nt, Artificial Sequence
  AAF00087 variant
augagaacccacacaaggggcgcccccagcguguucuuuaucuaccugcucugcuucgucuccgcuuauauuacugacgagaacccugaaguuaugauaccauuuacgaaugcaaacuacgauucucauccgaugcuuuauuucucacgggccgagguggcggaacugcaguugcgcgcugccaguagccacgagcauaucgcagcccgauuaaccgaagcuguacacacaaugcuguccucuccccuagaguaccucccuccaugggaccccaaggauuauucggcacguuggaaugagauuuuugggaacaaucugggagcccuugcuauguucugugugcuguacccugaaaacaucgaggccagagacauggcgaaagauuauauggaaaggauggcagcccaaccaucaugguuggucaaggacgcucccugggaugaggugccucucgcccauagccugguugguuuugcaacugcuuacgacuuccuguacaauuaucucaguaaaacccagcaggagaaguuuuuagaagugauugccaacgcguccggcuacauguaugagacaucuuaccggcgcggguggggauuccaguaucugcacaaucaccaaccaaccaacugcauggcccuuuugacuggcagccugguccuaaugaaucaggguuaccuccaggaagcauaucuguggacaaaacaggugcuuaccaucauggagaagucccugguauugcucagagaaguuacggaugggucacuguacgagggaguggcuuacggcaguuauacuaccaggagcuuauuucaauacauguuccugguccagcggcauuuuaacauaaaucacuucggccauccguggcucaagcagcacuucgccuuuauguaucgcacaauccuucccggguuccagcgaacuguggcuauugccgacucuaacuacaauugguuuuauggaccugagucccaacugguguucuuggauaaauuugucaugagaaacgguucaggcaacuggcuagcagaccagaucaggcggaaucguguuguggaagggccaggaacccccagcaagggccagcgcugguguacacugcacaccgaguuccucugguacgaugguagucugaaaucuguaccuccacccgacuuugggacgccgacucuucauuauuucgaagacuggggaguggucacauacggcuccgcccugccugcugagauuaacagaucguuuuugagcuucaagucuggcaaacucgggggaagggcgaucuacgauauagugcaccggaauaaguauaaggacuggauuaaagguuggcgaaacuuuaaugcaggccaugaacaccccgaucaaaacuccuucaccuuugccccaaaugggguuccuuucaucacugaggcucuguacggacccaaguauacauucuuuaacaauguguuaauguucucaccagccgucaguaaaagcugcuuuucccccugggugggccagguaaccgaggacuguucuagcaaguggucaaaauacaagcaugaucuggcagccaguugccagggucgcguuguggcugccgaagagaaaaacggggucguguucauuagaggcgaaggagucggcgcauauaauccucagcuaaaccucaagaaugugcaaaggaaccugauccuuuugcacccacagcugcuccugcuuguugaccagauccaccugggggaggaauccccguuggagacggcggcuagcuuuuuccauaauguggauguacccuuugaggaaaccgucguggacggaguucacggugccuucauucggcagcgcgauggccucuacaagauguauuggauggacgauacaggguacucugagaaagcaacuuuugccucagugaccuacccuagaggauauccauacaacggcacaaacuaugucaaugugacuaugcaucugaggagucccauaacccgugcugccuacuuauucaucgguccuagcauugacguacaauccuuuacagugcacggggacucucagcagcuggauguuuucaucgcaaccucgaagcacgcuuaugccacuuaccuauggacgggcgaagcgacaggacagagcgccuuugcucaagucauagcagaccggcauaaaauucucuucgaucgaaacuccgccaucaagucaaguaucgugccagaggugaaagacuaugcugccauugucgagcagaaucugcagcacuucaagcccguuuuucagcuuuuggaaaagcaaauccugucuagagugaggaacaccgcgagcuuccgcaaaacugcagagcggcuccugagauuuuccgauaagaggcagaccgaagaggccauugaccgcauauucgcuaucucacagcaacagcagcagcaaagcaaaucuaagaaaaaucgacgggccggcaagcguuacaaguuuguggaugcaguaccggacauuuucgcucagaucgaagucaacgagaaaaagaucagacagaaagcccagauuuuagcacaaaaggagcugccuauagaugaagacgaggaaaugaaagaucuuuuggacuuugccgaugugacauacgagaagcauaagaaugggggacucaucaaagguagguucggccaggcucgcaugguuaccacuacacacucccgggcgccaagucugagcgccucuuauacgagacuauuucugauucucaacaucgcaauuuucuuugugaugcuggcuaugcagcuuaccuacuuccagagggcccaauccuugcaugggcagcgaugucuguaugccgucuuacucaucgacucaugcauacugcuuuggcuguacaguagcuguucgcagucccaaugcuga

SEQ ID NO: 2454 - RNA, 2892 nt, Artificial Sequence
  AAH93784 variant
auggccaccgcugcagagacaagcgccuccgaacccgaggcggaaucuaaggcuggcccuaaagccgacggggaggaagaugaggugaaggcagccagaacuaggcggaaaguccugucacgcgcuguugcagccgcuacguacaagaccaugggaccagccugggaccagcaagaggaaggugugagugagagcgauggcgacgaauaugcgauggcauccucugccgagucgucaccgggggaguacgaaugggaguaugaugaagaggaagagaaaaaccagcucgagaucgaacgacuugaggaacagcugagcauuaauguauacgacuauaacugccacguggauuugauacguuuacugagacuagagggagaacucacaaaggucaggauggcucggcagaagaugagugagaucuucccccugacugaggaacuuuggcuggagugguugcaugacgaaauuuccauggcccaagauggccucgaccgcgagcacguguacgaucuguuugaaaaagcaguuaaggacuauaucuguccuaauauuuggcuggaguacggucaguacucugucgggggaaucggccagaaaggcgggcucgagaaggugagaagcguguucgaaagggcuuuauccucaguaggacugcauaugaccaaaggucuugccuugugggaggcguaucgggaauuugagagugccauaguugaggcagcucgccuggaaaaggugcacagccuauuccgaagacagcucgccaucccacuguacgauauggaggcuacauuugccgaauaugaggaauggucugaggaccccauuccugaguccgucauccaaaacuacaauaaggcacuucagcagcuggaaaaauauaagccauacgaggaagccuugcuccaggcugaggcgcccaggcuggcagaauaucaagccuacauugacuucgagaugaaaaucggcgauccugcucggauacaguuaauuuuugagcgugcccugguggaaaacugccucgugccagaccuuuggauccgcuacucacaguaucuggauagacaauugaaggucaaagaccuaguucugagcgugcauaauagggcaauucggaacuguccguggaccguagcccucuggagucgauaccugcuugcuauggagcgccacgggguggaucaccaggucaucucugugacuuucgaaaaggcccugaaugcaggauuuauccaggcgacagacuauguugagauuuggcaggcuuacuuggauuaucucagaaggcggguggacuucaaacaagauuccagcaaggaacuggaggaguuacgcgccgcauuuaccagagcccuggaauaccuaaagcaggaggucgaagagagguucaacgagucgggcgaccccucuugcgugauaaugcagaauugggcucguaucgaagcccggcucuguaacaauaugcagaaagcacgagagcugugggauuccauuaugacgagagguaacgcuaaguaugccaauauguggcuugaauacuacaacuuggagagggcgcauggggacacucaacacugccgcaaagcccugcaucgggcuguacaguguaccucagacuauccugaacacguuugcgaggugcuccugacaauggagagaacugaaggaagucuugaggauugggacaucgcaguccagaagaccgaaacaaggcuggcccgcgugaacgagcagcgaaugaaagcugccgaaaaggaggcagcguugguccaacaggaggaagagaaggccgaacagcggaaacgugcuagagccgagaagaaagcacucaagaaaaagaagaaaauaaggggcccagaaaagcgcggcgcugaugaggacgaugagaaagaauggggagacgaugaggaagaacagcccagcaagcggagaaggguggaaaauuccauuccugccgcaggggaaacccaaaacguugagguggccgcugguccagcgggcaaaugugccgcaguagacgucgaacccccgucuaagcagaaggagaaagcugccagccugaagcgagauaugccuaaaguguuacacgacucaaguaaggauuccaucacgguuuuugugagcaaucugcccuacucuaugcaggaaccagacacuaaacuacgcccucucuucgaggccugcggggaggucgugcaaauccggcccauuuucucaaacagaggagauuuuaggggcuauuguuacguagaguucaaggaggagaaaagugcucugcaggcacuugagauggaccguaagagcguggaaggucgcccaauguuuguuucccccugcgucgacaagucuaaaaauccugauuucaagguguuucgguauucgaccagcuuggagaaacauaagcuguucaucuccgggcucccauuuucaugcacaaaagaggaacuggaggaaauuuguaaggcccacggcacugugaaggacuuaagacuggucacaaacagggcgggaaaaccgaagggccuugcuuacguugaguaugaaaaugagagucaggccucucaggcagugaugaaaauggaugggaugaccauaaaggagaacaucauuaaaguggccaucagcaaucccccucaacgaaagguaccagaaaagcccgagacgcggaaagcuccuggagguccaauguugcucccccagaccuacggcgcacgcgggaagggaagaacacagcugucccuacugccgagggcccuccagcggccuucagcggcugccccacaagcagaaaacggccccgccgcugccccugcagucgcugcccccgcggccacugaggcaccaaaaaugagcaaugcugacuucgccaagcuguuucuucgaaaauga

SEQ ID NO: 2455 - RNA, 2283 nt, Artificial Sequence
  AAC51668 variant
augaagaccugggugaaaaucgucuucggcguugccacaagcgcugugcuggcacuccuuguaaugugcauugugcugagacccuccaggguccacaacucugaggaaaauacuaugcgggccuugacguuaaaggacauacugaacgggaccuuuucauacaaaacauucuuuccuaauuggaucaguggacaggaguaucuacaucaaagcgcggauaacaauauugugcucuacaacaucgaaacuggucaguccuauaccauucugucuaaucgcacaaugaagucgguuaacgcuucaaauuacggccuuagcccagaccgacaguucguguaucuggagagugauuacuccaaauuguggcguuauucuuacaccgccacuuacuauaucuacgaccucagcaacggggaauuugucagaggaaaugagcugccgaggcccauacaguaucuguguugguccccugugggcucaaagcucgcauacguauaucaaaacaauaucuacuuaaagcagcggccaggugaucccccuuuccagauuacauuuaacgggcgcgagaauaaaaucuucaacggcauuccagacuggguuuaugaagaggaaaugcuggccaccaaguacgcucuuugguggagucccaacggaaaauuuuuggcauacgccgaguucaaugauacggacaucccugugauagcuuauagcuacuauggcgaugagcaguacccaagaacuauuaacaucccguaucccaaggccggggcgaaaaauccugucgugaggauuuuuaucaucgacaccacauacccagcauaugugggaccccaagaagucccuguuccagccaugauugcuucuuccgauuacuacuucucauggcugacuugggugaccgacgagcggguaugccuacaguggcucaagcgcgugcagaacgucagcgugcugaguauaugugauuuucgagaagacuggcagacaugggacugccccaagacccaagagcacaucgaagagucuagaacggguugggccggcggguucuucguuuccacuccgguguuuagcuaugaugcaauuucguacuauaaaaucuucucugacaaggauggauacaaacauauacacuauauuaaggacacagucgagaaugcuauccagaucaccuccggcaaaugggaagccauuaacaucuuuagggugacucaggauucacuuuucuacaguagcaaugaguuugaagaguauccuggucggcguaacauuuaccgcauauccaucgggucuuaucccccaagcaagaaauguguaacaugccaucugagaaaggaaaggugucaauacuacaccgcgucauucagugacuaugccaaguacuaugcauugguuugcuacggaccuggcauucccaucuccacgcuccacgauggccggaccgaccaggagaucaaaauucuggaggaaaauaaggaguuagaaaacgcucugaaaaauauacagcucccaaaggaggaaaucaaaaagcuggagguggaugagauuacacuuugguauaagaugaucuugcccccucaguuugaccgaagcaaaaaguacccacuacugauucaagucuacgggggaccguguucucagucagugcgcagugucuucgccgugaacuggaucagcuaucucgcuuccaaagaagguaugguuauagcccugguggauggcagagggacugcauuucagggagacaaacuucuguacgccguauauaggaaguugggcgucuacgagguggaagaccagaucaccgcuguucggaaguucauugagauggguuuuaucgaugagaagcgcauugcgaucuggggguggucuuauggcggauacgugucgagccucgcacuggccuccggcacaggguuauucaaaugcggaauagcugucgcccccgugucaaguugggaauauuacgcaucuguauacacugagagauuuaugggucugccuaccaaggacgauaaucuagaacacuauaaaaacagcacagugauggccagggcugaguacuuccguaauguugacuaucuccugauucauggcaccgccgaugacaacguccacuuccaaaacuccgcacagaucgcgaaggcucuugugaaugcccagguggauuuucaggcaaugugguacucagaccaaaaccauggguugagcggacugucuacuaaucaccucuauacgcacaugacacauuuccugaaacaguguuuuucccuuagugauuga

SEQ ID NO: 2456 - RNA, 1128 nt, Artificial Sequence
  CCDS32839.1 variant
auggacgcccugcagcucgcuaacagcgcauucgccguggaucuuuuuaagcaacugugcgagaaagaacccuugggcaaugucuuauucuccccuaucugucugucuaccucacuaagucucgcgcagguuggggcuaagggagacacagccaacgagauuggucaggugcugcacuuugaaaauguaaaagaugugccauucggcuuucagacugucacgagcgacgugaacaaacuuuccucuuucuacucgcugaaauugauaaagagacucuauguugauaagucacugaaucugagcaccgaguuuaucaguuccacaaaaaggccguacgcaaaggaacucgagacuguggacuucaaagauaaguuagaggaaaccaaagggcaaauuaacaauucuaucaaggaccugacagauggacauuuugagaacauucuugccgacaauagcgucaacgaucagaccaagaucuuggugguaaaugcugcauauuucguuggcaaauggaugaagaaauuuuccgaaucagagacuaaggagugccccuuccgggugaacaaaacagacaccaagccuguccagaugaugaauauggaagccacguuuuguauggguaacauagauaguaucaauugcaaaauuaucgagcugccauuccagaacaagcaccuaagcauguucauucuccugcccaaggacguggaagacgagucuacugggcuugaaaagaucgagaagcaacugaacuccgagucauugagccaguggaccaauccuaguacaauggcuaacgccaaagugaagcucucuauaccaaaauuuaaggucgaaaagaugauugaucccaaagcgugucuggagaauuuaggacugaagcauaucuucuccgaagacacuagcgauuuuucgggcaugucugagaccaaaggcguugcacucuccaacgugauucacaagguaugccuugaaaucacagaggacgggggagauucaaucgaggugccuggugcccgcauucugcagcauaaagacgaauugaaugcugaucacccauucauauacaucauucgacacaacaagacccguaauaucauauuuuucggcaaguuuuguaguccguga

SEQ ID NO: 2457 - RNA, 1002 nt, Artificial Sequence
  AAH06564 variant
auggccugcagcagacccccuucccagugugagccaaccucucugccgcccggcccuccagcugggaggcggcaccucccccuuucacgccgacguagagaaaugaguagcaacaaggagcaaagguccgcaguguucgucauccuguuugccuugauuacaauauuaauccuguacucuucaaauucggcgaacgaaguuuuccauuauggaagccuacggggucgcaguagaaggccugugaaucucaaaaagugguccauuacugacggcuacguaccaauccuggggaacaaaacgcuucccucucggugccaccagugugugauugucagcuccucaagucaucuguugggaaccaagcucggcccugagaucgaacgcgcugagugcacaauacgaaugaaugaugccccaacuaccgguuauagcgcagacguggggaacaaaacaaccuacagaguuguggcccacucuuccgucuuuagggugcugcggcguccgcaggaguucguaaaucgcacucccgaaacaguuuuuaucuucuggggaccuccaucaaagaugcagaagccccaaggcagccuggugagagucauucagagggcuggccucguguuuccuaacauggaggcauaugccgugaguccagggcggaugcgacaguucgaugacuuauuucgcggagaaaccgguaaagauagagagaagucucauuccuggcugagcacgggcugguucacuauggucaucgcuguugagcuuugugaccacgugcacguauacgggauggugcccccgaauuauugcucgcagaggccucgguugcaacgcaugcccuaccauuacuaugaaccaaaaggaccugaugagugugucaccuacauucagaacgaacacucuagaaagggcaaucaucacagguuuaucacagagaaacguguguucuccucaugggcccagcuguaugguauaacuuuuagucaccccagcuggaccuga

SEQ ID NO: 2458 - RNA, 1071 nt, Artificial Sequence
  AAC37586 variant
augagccccugcggcagagccaggcggcagaccucccgcggggcuauggcagugcuggccuggaaguucccucgaacacgucucccaaugggagcgucugcucuuugugucguugugcugugcugguuguacaucuuuccgguauauagauuacccaacgagaaagaaauugugcaagguguccugcagcagggcacugccuggaggcggaaucagacggcagcccgcgcuuucagaaagcaaauggaggacuguugcgauccugcacaccuauuugccaugaccaaaaugaacucaccaauggggaagaguaugugguacgacggagaguuccucuauagcuuuacaauagauaauuccacuuacucucuguucccccaggcuaccccuuuucagcuuccacugaaaaagugugccgugguuggcaacggugggaucuugaagaaaucgggaugcggcaggcagauugacgaagcgaauuucgugaugcgguguaaccugcccccucucucaagcgaauauacaaaggaugucggcaguaaaucccaacuggugaccgcaaauccaucuaucauucgccagcgauuucagaaccucuuauggagcagaaagacuuucguagacaauaugaaaaucuacaaccauuccuauauauacaugccggccuuuucaaugaagacagggaccgagcccagucugaggguuuacuauacgcuuagcgaugugggagcuaaucagacugucuuguucgccaacccuaauuuucugcggucuaucgguaaguucuggaaaucccguggcauucacgcaaagcgccuaucaaccggacucuuccuggugagcgcugcccuugggcugugcgaggaaguggcgaucuacggcuuuuggccauucagugucaacaugcaugagcaacccauuucucaccauuauuacgacaauguuuugccuuuuuccgguuuccacgccaugccagaagaguuucuccagcugugguauuuacacaaaaucggggcacugagaaugcagcucgaucccugugaggacacaagccuucaaccgacuucguga

SEQ ID NO: 2459 - RNA, 1257 nt, Artificial Sequence
  BAG50894 variant
augagaaccaaggccgcuggcugcgcagaaaggcggccccugcagccucgcacagaagccgcggcugccccagcagggcgagccaugccgagcgaguacacuuaugugaaacuccguuccgacuguucuagacccucacuucaaugguacacgagggcucagaguaagaugcggcgcccuagccuguuguuaaaagauauccugaagugcacccuacucgucuucggaguuuggauucuguauauacuuaaacugaacuacacaacugaagagugugacaugaagaagaugcacuauguggauccagaccauguaaaaagagcacagaaguacgcccagcaaguguugcagaaagaaugcaggcccaaguuugcuaaaaccuccauggcccuccuguucgagcaccgguauucugucgaucugcucccuuuugugcagaaggcgccaaaggacucggaggcagaaucaaaauacgaucccccuuucgguuuucgcaaguucagcaguaaaguucagacauuacuggagcuuuugccagaacaugaccugccggagcaccuaaaggccaaaaccugucgaagaugcguggucaucggcuccgggggcauucuccauggacuggagcuuggucacacucugaaucaauuugaugugguaaucagguugaacucugcucccguugaaggguacagcgagcacgugggaaauaagacaaccauucggaugacguauccugaaggcgccccacucuccgaccuggaguacuauucaaacgauuuauucgucgcagugcuguuuaaaaguguggacuucaauuggcuccaggcuauggucaagaaggaaacucuucccuuuuggguucgucuguucuuuuggaaacagguggccgagaagaucccuuugcagccaaaacauuuccgcauacuaaaccccguaaucauuaaggagaccgcguucgauauccugcaauacagcgaaccgcagucuagauuuuggggcagggacaaaaaugugccuacaauuggggucaucgccgugguucucgcaacucaccugugugacgaggugucccuugcuggauucgguuaugaucugaaccagccccggaccccauugcauuacuuugacucacaaugcauggccgcuaugaauuuccagacaaugcacaacgucaccacggaaacuaaguuucuccugaaguuagugaaagagggcguaguuaaggaucugagcgggggaauagaccgagaguucuga

SEQ ID NO: 2460 - RNA, 1059 nt, Artificial Sequence
  EAW56837 variant
auggacuuccugagaaaccucuuuagccagacccuuucccugggcucucaaaaggagagguuguuagaugaacugacacuagaggggguggcccgguacaugcagucagaacgcugccgacgugucaucugucucguuggagcugguauuaguacuagcgcaggcauacccgacuucagauccccuucuacggggcuguaugauaaucuugagaaauaccaucugccauauccggaagccaucuuugagauuucguacuucaagaaacaccccgagccauuuuucgcguuggcuaaggaacucuauccuggacaguuuaaacccaccaucugccacuacuucaugaggcugcugaaggacaagggccucuuacugcgguguuauacacagaacauugauacucuugagcgcaucgccgguuuggaacaagaggaccugguggaggcacaugggaccuuuuacacaucacacugcguaagcgccaguuguagacaugaauacccucuauccuggaugaaagagaagauauucucugaagugaccccaaaaugcgaggauugucagagccucgucaagcccgacaucguguuuuucggagaaucccugccugcuagguuuuucucaugcaugcagagugauuuccuuaaaguugaccuguugcucgugaugggcacuagccugcagguccaaccauuugcaucuuuaauuuccaaggccccgcugucaacaccccggcuccuuaucaauaaggagaaagcuggccagagcgauccuuuccuggggaugauuaugggauuggguggcgggauggacuuugauaguaagaaagccuaucgcgacguggcguggcuaggagagugugaccagggcugccuggcacucgccgaacugcuugguuggaagaaagagcuggaagauuugguacgaagagagcacgcuucuaucgacgcccaguccggggcaggaguuccaaaccccagcaccucggcuucuccuaagaaauccccacccccggccaaggaugaagcgaggacgacugagcgggagaagccucaauga

SEQ ID NO: 2461 - RNA, 1170 nt, Artificial Sequence
  AAD40850 variant
auggccgagcccgacccuagccacccacuggaaacccaggcuggcaaggugcaagaggcacaggauuccgacucugauucagaagggggagccgcggguggcgaggcugacauggauuuccucagaaaccuuuuuagucagacacugagcuuggggucccagaaagaaagguuacuggacgagcuaacucucgagggagucgcccgguacaugcaaucugaacgcugccgacguguuaucugucuggugggcgcagguauuucgacgucagccgggauaccggauuucagaagccccaguaccggacuuuaugacaaucuggagaaguaccauuugccuuauccagaagcuaucuuugagauuuccuacuucaaaaagcaccccgagccauuuuucgcacucgccaaagaacuguauccuggccaguuuaagcccacaaucugccauuacuucaugaggcugcucaaggauaaaggcuuacugcuucgguguuauacucagaacauugacaccuuggagcgcaucgcugggcuggaacaggaggaucuaguagaagcccacggaacauuuuacaccucucauugcgugagcgcguccuguagacacgaguacccucucucauggaugaaggagaaaauauucagugaagucacuccaaagugcgaggacugucaaagccuggugaaaccggauaucguguuuuucggugaaucucuucccgcaagguuuuucuccugcaugcagucagacuuccugaagguugacuugcuccuggucaugggcaccagcuuacaggugcagccuuuugccagucugauuucuaaggcuccacucuccacaccccggcuucugaucaauaaagagaaggccgggcaaagcgauccuuucuugggaaugauuaugggccuaggugggggaauggacuuugauucgaaaaaggcauaucgcgacguagcuuggcugggcgaaugugaucagggcugccucgcccuggcggagcuucugggguggaaaaaggaguuggaagaccucguucgaagagagcacgccucuaucgaugcacaguccggagcuggugugccaaaccccucaacgagugccagcccgaaaaaguccccucccccagcuaaggacgaagccaggacuaccgagcgggaaaaaccucaauga

SEQ ID NO: 2462 - RNA, 1401 nt, Artificial Sequence
  AAH02824 variant
auggccgaggaacaggaccugagcgagguggaacucucccccgucggcucugaggaaccuagaugccuuucaccagggagugcuccgagccugggacccgaugguggcgggggaggcuccgguuugagggcaucuccugggccaggagaguuaggcaagguuaaaaaggagcaacaggacggcgaagccgaugacgauaaauuccccguguguauccgggaggcgguaucgcaagugcugucaggguacgacuggacccuagucccuaugccagugcgcguuaacggagcuagcaagaguaaaccccacgugaagcgaccuaugaaugccuuuauggucugggcacaggccgcucguagaaagcucgcagaucaauauccacaucugcacaacgccgaacuuuccaaaacacuggguaaguuguggaggcuccugaaugagucugacaaacggccguucauugaggaagcugagcgccugagaaugcagcauaagaaagaucaccccgacuacaaguaucagccuaggcggcgcaagaacggcaaagccgcgcagggggaagcagagugcccaggaggcgaagccgagcaaggugggacugcugccauacaggcacauuacaagagcgcucaccucgaucaccgacaucccggagagggcuccccuaugucagacggcaauccagaacaccccagugggcagagccauggaccgccuacgcccccaaccacaccuaaaacugaguuacagucugguaaggccgaucccaaaagagacggcagguccaugggggaaggaggcaagccacacaucgacuuugguaacguggauauuggggagaucucacacgaaguaaugagcaauauggagaccuucgacguugcggagcuggaucaauaucuucccccuaacggccauccaggacacgugaguucuuacuccgccgcaggcuauggguugggaagcgcucuggccgucgcuucgggucauucugccuggauuuccaaaccgcccggcguggcacuaccuacagugucaccacccggggucgacgccaaggcucagguuaagaccgaaacugcgggaccucagggcccaccccacuacacagaucaaccgaguaccagccagaucgcauacacgucccucucucugccucauuaugguagcgccuuuccaucaauaagucggccccaguucgacuacuccgaucaccagccuagcgggcccuauuacggccacucuggacaggcuucaggccuuuauagugccuuuagcuacauggggccaucccagcguccucuguauacugcaaucucugaccccucgccaagcggaccgcagucccauucaccuacccacugggagcagcccguguacacaacuuugagucgcccauga

SEQ ID NO: 2463 - RNA, 456 nt, Artificial Sequence
  AAH32457 variant
augagcauccccuucuccaacacccacuacaggauuccucagggcuuugggaaucugcucgagggacuuacaagagaaauacugcgggagcaaccagacaacaucccggccuucgcugcagccuauuuugaaucuuuguuagagaagcgcgagaaaacuaauuucgaucccgcggagugggguucaaagguggaggaccgauuuuacaacaaucaugcuuucgaagaacaggaaccuccagagaaaagugaucccaagcaggaggaaagccagauuuccggcaaagaggaagagacgucugucaccauccuggacucgucagaagaggauaaggagaaggaagagguugccgcagugaaaauucaagccgcuuuucgugggcacaucgcaagagaagaggccaagaaaaugaagacaaacagccuacagaaugaagagaaagaggaaaacaaguga

SEQ ID NO: 2464 - RNA, 294 nt, Artificial Sequence
  AAF28420 variant
auggacaagcagagcuccgccggcggggugaaaagaucuguccccugcgauucaaacgaggcuaaugaaaugaugccugagaccccaacaggagacagugauccgcaacccgcaccuaagaaaaugaagacuagcgaauccucuacgauccugguugugagguaccggcgcaacuucaaacgaaccucgccagaggaacuccuuaaugaccacgcccgugagaacagaauuaauccccugcagauggaggaagaggaauuuauggagauaaugguagagaucccugcgaaguga

SEQ ID NO: 2465 - RNA, 426 nt, Artificial Sequence
  AAH62750 variant
auggagcagcccaccagcuccacaaacggcgaaaagacuaaaucuccuugcgagucaaauaacaagaaaaaugacgaaaugcaagaggugccaaacagaguccuggccccggaacagagucucaagaaaacgaagaccagcgaguaccccaucauuuucguuuauuaccuuaggaaggggaaaaagauaaauuccaaccagcuggagaaugaacagucucaagagaacucgaucaauccuauucagaaagaagaggaugagggaguggacuugucagaagguagcaguaacgaggaugaagacuuaggcccaugugaggggcccuccaaggaagauaaagaccuggauucuagcgagggauccucacaggaggacgaagaucuaggccucagugaggguagcucucaggacuccggggaagauuga

SEQ ID NO: 2466 - RNA, 567 nt, Artificial Sequence
  AAH01003 variant
augaacggcgacgauaccuucgccaagagacccagggacgaugcuaaagcaagcgagaagcgguccaaagccuuugacgauaucgcgacauacuucucuaagaaagaauggaagaagaugaaauauucagagaagauuaguuacguguauaugaaacgcaauuacaaggcuaugacuaaacugggguuuaaggucacgcucccuccauucaugugcaacaagcaggccaccgacuuucaaggaaaugauuucgacaacgaucacaaucgacguauacagguugaacauccgcagaugacauuugguagacuucacaggaucauucccaaaaucaugccuaagaaaccagcagaggacgaaaacgauagcaagggcguguccgaggccucugggccccagaaugacggaaaacaacugcauccuccaggcaaggcuaacauuucggagaaaaucaauaagcggucaggucccaagcgcgggaaacacgcauggacucauagauugagggaacggaagcaguuaguaauauaugaggaaaucagcgauccugaggaggacgacgaauga

SEQ ID NO: 2467 - RNA, 567 nt, Artificial Sequence
  AAH16957 variant
augaacggcgacgaugccuucgcuagaaggcccaccgugggggcacagaucccugagaagauucaaaaagccuuugacgauauagcgaaguacuucagcaaagaagagugggaaaagaugaaggcuuccgagaaaaucuuuuaugucuacaugaagcggaaauaugaagccaugacaaagcugggauucaaagcaacucucccaccguuuaugugcaauaagcgcgccgaggacuuccaggguaacgaucuugacaaugaucccaaccgaggcaaucagguugagcguccucagaugacguuugggagacugcaaggaauuucuccaaaaaucaugcccaagaagccugcugaagagggcaacgacucagaagaggugccagaggcaagugguccccagaaugaugggaaagaauuguguccuccaggaaagccgaccacaagcgagaaaauucacgaaagguccggccccaagcggggcgagcaugccuggacucaccgcuuaagagaaaggaaacagcugguaaucuacgaggagauaucugacccugaagaggaugacgaauga

SEQ ID NO: 2468 - RNA, 567 nt, Artificial Sequence
  AAC05819 variant
augaacggcgacgauaccuucgccagaaggcccacagugggggcucagaucccugagaagauucaaaaagcauuugacgauauagccaaguacuucagcaaagaagagugggaaaagaugaaagucuccgagaagaucguuuauguguacaugaagcggaaauaugaagcgaugacuaagcugggauuuaaagcuauucucccaucuuucaugcgcaauaagcgaguaacggacuuucaggguaacgauuucgacaaugauccgaaccguggcaaucaggugcagagaccccaaaugaccuuugggaggcuucagggaaucuucccuaaaauuaugccaaagaagcccgccgaggagggcaacgucucaaaagaagugccugaggcaagugguccacagaaugacgggaagcagcugugcccucccggaaaaccaacaacuagcgaaaagaucaacaugauauccggcccgaaacggggcgagcacgccuggacccaucgcuugagagagaggaagcaauuaguuaucuacgaagagauuucugaucccgaagaggacgaugaauga

SEQ ID NO: 2469 - RNA, 567 nt, Artificial Sequence
  AAC05820 variant
augaacggcgacgaugccuucgcuagaaggccccgggacgaugcacagaucagcgagaagcugcgcaaagccuuugacgauauugcgaaguacuucuccaaaaaggaaugggagaaaaugaagucuucagaaaagauaguguaugucuacaugaaacucaauuaugagguuaugaccaaacuuggguuuaaggugacacugccuccauucaugcgaaguaagcgugcugccgacuuucacggaaacgauuucgguaaugacagaaaccauaggaaucaaguagaacggccgcagaugacuuuuggcagcuugcagcgcaucuuccccaaaauuaugccuaagaagccagcagaggaggaaaacggguuaaaagaggugcccgaagccuccggaccucagaaugauggcaagcaacugugcccacccgguaacccuucuacgcuagagaaaaucaauaagaccucggggccaaaaagaggaaagcacgcuuggacacauaggcuccgggagcgcaaacagcuggucguguacgaagagauuucagacccggaagaggaugacgaauga

SEQ ID NO: 2470 - RNA, 888 nt, Artificial Sequence
  CCDS32420.1 variant
auggagcugauccaggacaccagcagacccccucucgaauacgugaagggcgucccacuuauuaaauauuucgccgaggcucuggggccguugcaauccuuucaggcaaggcccgaugacuuacugauaucuacauacccuaagucaggaacuacguggguuagucagauccuagauaugauuuaucaggguggcgaccucgaaaaaugccaccgggccccaaucuucaugcgcgugcccuuucuggaguucaaggcgccugggauuccaagcggaauggaaacccuuaaagauacacccgcuccucgacuguugaagacucaucucccacuggcccugcucccgcaaaccuuacuggaccagaagguaaaaguggucuacguggcacguaacgccaaggauguugcuguguccuauuaccacuuuuaucauauggcaaaaguccaccccgagccuggcacaugggacucuuuccuugagaaguuuauggugggugaaguaucguacgggucaugguaccagcauguucaggaguggugggaauugagcagaacccacccagugcuguaucuauucuacgaggauaugaaagagaaucccaagagggaaauccaaaagauacucgaguuugucggacggagucugccugaagagacuguggacuucgugguccagcacacauccuuuaaagaaaugaagaaaaacccaaugaccaauuauacgacuguuccccaggaguucauggaucauucuaucagcccguuuaugcgcaagggcauggccggcgacuggaaaaccacauucacuguggcucagaacgagagauucgaugccgacuacgcggaaaagauggcaggguguucccuuucauuuaggagugagcuguga

SEQ ID NO: 2471 - RNA, 3807 nt, Artificial Sequence
  CCDS43990.1 variant
augaucgccgcucccgagauuccuaccgacuucaaccugcuccaggaaagcgagacacacuuuuccucugauacugacuucgaagauauagagggcaagaaucaaaaacaggggaagggaaaaacgugcaagaaagguaagaagggcccagcagaaaaagggaagggaggcaacggugggggaaaaccgcccucaggcccuaauagaaugaacggccaucaccagcagaaugggguggagaacaugaugcuuuuugaggucguuaagaugggaaaaagugccaugcaaagcgugguagacgauuggaucgaauccuacaagcaugacagggauauugcgcuguuggacuuaaucaauuucuuuauucaguguucugguugcaagggcguggucaccgcugagauguuccggcacaugcagaacucggaaaucauacgcaaaaugacagaggaguuugaugaagacucaggggauuauccacugacuauggccggaccccaguggaagaaauucaagagcaguuuuugugaguucaucggcgugcuaguucgacaaugccaguacuccauuaucuaugacgaauacaugauggauaccgugauuucucuccugacaggucuuagcgacucccagguccgugcauuuagacauaccucaacucuggccgcuaugaaauugaugacagcacucgugaauguagcccugaaccugaguaucaauauggacaacacccagaggcaauaugaggcugaacggaauaagaugauagggaaacgcgccaacgagagacucgaguuacugcuucagaagaggaaggaauugcaggagaaucaagaugaaauugagaacaugaugaacgcgaucuucaaaggaguuuuugugcaccgguaccgcgacgcaauugccgaaauccgagcuaucuguauugaggagauaggcaucuggaugaagauguauagcgaugccuuccugaaugacucuuaccuaaaauacgucggcuggacgaugcacgauaagcagggggaagugagacucaaaugccugacugcacuucagggacuguauuacaacaaggagcucaauuccaaguuggaacuguucaccucaagguuuaaagaccggauugugagcaugacauuagauaaggaguaugacgucgcuguucaggccaucaaacugcucacucuugugcugcaaaguucugaagagguauugaccgcggaggauugugaaaacguguaccaucuagucuauuccgcccaccguccuguggcaguugcugccggugaguuccuguacaagaaacucuuuagccgcagagacccagaagaggauggcaugaugaagaggcgggggcgacagggacccaaugcuaaccuggugaagacacuugucuucuuuuuccuggagucggaauugcaugagcacgccgcauaucucguggacucuaugugggacugcgccaccgaacuguuaaaagauugggaguguaugaacucccugcuacucgaagaaccucugucaggcgaggaagcucuuacggaccgccaggagagugcguugauagaaauuaugcugugcacuaucagacaggcagccgagugucacccaccgguagguagggggacaggcaagcggguucucaccgcuaaagaaaagaaaacucaacuggaugaccgcacaaagaucaccgagcuuuuugccguggcacugccccaguugcucgccaaguacagcgucgaugcugagaaagugacgaaucuguuacagcugccucaguacuucgaccuagaaauuuauaccacaggaagacucgagaagcaucuggaugcccuuuugaggcaaauccguaauauugucgaaaaacacacugacaccgaugugcuggaggcaugcuccaagacauaccaugcgcucugcaacgaagaguuuacuauauucaaucggguugacaucucucgaagccagcugauugaugaguuagcugacaaauuuaacagacugcuugaagauuucuugcaggagggcgaggagccagacgaggacgaugccuaucaggugcucucaacccugaagaggaucacagcauuucacaaugcccaugaccuaaguaaaugggaucuguucgcuuguaacuacaagcuccugaagaccgggaucgaaaauggagacaugcccgagcaaauuguaauacacgcccuucagugcacucacuaugucaucuuguggcagcuggcaaaaauuacggaauccagcucuacaaaggaggauuuacuccgccugaaaaagcaaaugcggguguucugucagaucugccagcauuaccuuaccaacguuaacacuaccgugaaagaacaggcuuuuacaauucugugugacaucuugaugauauucucacaccaaaucaugagugguggcagagauaugcucgagccucuggucuauaccccagacagcucccuacagucugagcugcucucguuuauucuggaucauguguucaucgaacaggacgaugacaauaacagcgccgaugggcagcaagaggacgaagcguccaagauugaggcccuucacaagaggcgcaauuugcuggcugcauuuugcaaauuaaucguauacacugugguugaaaugaacacagccgcugacauauucaagcaguacaugaaauauuacaaugauuauggagacauuaucaaggagacgaugucaaaaacccgacagauugauaagauccagugugccaagacucucauacugagucuucaacagcuguuuaacgagaugauccaggaaaauggcuacaacuucgaccggucuagcuccacauuuucagguauuaaagagcuagcacguagauucgcgcucaccuuugggcuggaucaauugaagacaagggaagccaucgcuaugcugcacaaagacggcauugaguucgccuuuaaggaacccaauccgcagggagagagccauccucccuuaaaccucgcauuccuggauauccuuucugaguucuccaguaaacuguugcgccaggacaagcggacugucuauguguaccucgaaaaguuuaugaccuuccagaugagccugagaagggaggauguguggcuaccacugaugucuuaucgaaauucccuucucgcuggcggggacgaugacacgaugucagucauaaguggaauuagcucgcgcgguuccaccguucggucuaaaaagagcaaaccuucaacaggcaagagaaaagugguggaagggaugcaacugaguuugacugaggaguccucuagcuccgacucaauguggcugagcagggaacagaccuuacacacacccguaaugaugcagacuccacagcucaccaguacgaucaugcgugagcccaagcgccugcggccugaagauucuuuuauguccgucuacccaaugcaaacagagcaucaccagaccccgcuugacuacaacacucaggugacauggaugcuggcccagagacaacaggaagaggcaaggcagcagcaagagcgagccgcuaugagcuauguuaaauugcggaccaaucuccagcaugcgauccgcagaggaacuucgcugauggaagaugacgaggaacccauuguggaggaugucaugaugucaucugaaggcaggaucgaggaccuaaacgaggguauggauuucgacaccauggauauugaccugccuccaaguaagaaucggcgagaaagaacagagcuuaagcccgacuuuuucgauccugccuccauaauggaugaaagcgugcucgggguuucuauguuuuga

SEQ ID NO: 2472 - RNA, 1473 nt, Artificial Sequence
  CCDS5615.1 variant
auggagagcaucuccaugaugggcucucccaagucacugagugaaaccuuccucccuaacgggauuaauggaauaaaagacgccagaaaggugacagucgguguuaucggcagcggggauuuugcuaaaucccuuacuauuaggcugauccggugcggauaccacgugguaauuggcucucgcaacccaaaguucgcaucggaguuuuucccgcauguggucgacgugacgcaccaugaagaugccuugaccaaaacaaauaucauauuuguugcgauccaccgagagcauuauacuucauuaugggaccugcgucaccuacucguggguaagauucugaucgaugucagcaacaauaugagaauuaaccaguaccccgaaaguaaugcugaguaucuugccucccuguucccugacucuuugaucgugaagggguuuaacguaguuagcgcaugggcccuccaacugggaccaaaagaugcuuccaggcaaguguacauauguucaaauaacauucaggcacggcagcaggucaucgagcuggcccgccagcucaauuucauucccaucgacuuaggcagucugagcucugcuagagaaaucgagaaccuuccuuugaggcuguuuacccuauggcggggcccagugguggucgccauuucccucgcgacauucuuuuuccuguauucauuuguucgcgaugugauacaccccuacgcacgaaaucagcagagcgacuucuauaagaucccuauugaaaucguaaacaaaacccuuccaauaguggccauuacucuguugagucucgucuaccuggcuggguuacuggccgcagcuuaccaacucuauuacggaacaaaguauagaagguucccgcccuggcuugagaccuggcugcagugccggaaacaguugggucuacugagcuuuuucuuugccauggugcauguugcguacucccucugucugccuaugcgucgcagcgagagauaucuuuuccugaauauggccuaccagcaagugcacgcaaacaucgaaaacucguggaaugaggaagaggucuggaggaucgaaauguauauuucuuuuggcaucauguccuuggggcuccugucauuacuggcugugacgaguauuccaagcguauccaacgcccuaaauuggcgggaguucucuuuuauacagagcacucucggauacguugcucugcuuaucucaaccuuccauguguugauuuacggcuggaagcgagccuuugaggaagaguauuaccgcuucuauacacccccuaacuuuguccuggcacucgugcugccaaguaucgucauccuugguaagauuauacuguucuugcccugcaucuccagaaaacucaagaggauuaaaaaggggugggaaaaaucucaguuucuggaggaaggaaugggcggcacuaucccgcacgugucuccugagcggguuaccgugauguga

SEQ ID NO: 2473 - RNA, 777 nt, Artificial Sequence
  EAW93749 variant
auggagagcagaaaggacaucaccaaccaggaagagauuuggaaaaugaagcccaggcggaaucuggaagauaacgacuaccuccacaaagauacaggcgagacuuccaugcuuaagcgcccugugcuguugcauuuacaacagacggcccacgcugacgaguucgauugcccaucugaacugcagcaugcacaggagcuauuuccgcaauggcaccuccccauaaaaaucgccgcggucauggcuucacugaccuuccuuuauacacuguugcgagaaguuauucauccucucgccaccagucaccagcaguacuuuuauaagaucccaauucuggugaucaauaagguacugcccauggugagcauaacucucuuagcacuggucuaccuuccuggggugaucgccgcuauuguucaggugcacaacggaacaaaauauaagaaauucccacauugguuggacaaguggaugcugacccguaaacaauuuggucuacucucccuguucuuugcaguccuucacgccaucuacacucugucuuaugcuaugagaaggucguaccgguacaaguugcucaauugggccuaucaacaggugcagcagaacaaggaggaugcguggauugaacaugacguauggcgcauggagaucuacguuucacugggcauagugggguuagcaauucuggcccuccuugcugucacaagcauccccaguguguccgauucucugaccuggagagaguuccacuauauucaggugaauaacaucuga

SEQ ID NO: 2474 - RNA, 1020 nt, Artificial Sequence
  AAD15620 variant
auggagagcagaaaggacaucaccaaccaggaggaacuguggaaaaugaagcccaggcggaaucucgaagaggaugacuaccuucacaaagauacaggcgaaacuuccaugcugaagcgcccuguguuguuacaucugcaccaaacggcccaugcugacgaguucgauugcccaucugagcuacagcacacccaggaacucuuuccgcaguggcaucugcccauuaaaauagcagccaucauugcgucacuuacauuccuguauacuuugcuccgagaggucauccacccucuggcuaccagucaccaacaguacuuuuauaagauuccaauccugguuauaaacaaggugcuccccaugguaagcaucacauuacuggcccuuguguacuugccuggggucauugcagccaucgugcagcugcauaauggaaccaaauauaagaaauucccacacuggcuagacaaguggaugcucacucguaaacaguuuggucugcuuuccuucuuuuucgcuguucugcaugcaauuuacucuuugucguaucccaugagaaggucauaccgguacaagcuccugaacugggccuaucaacaggugcagcagaauaaggaagaugcuuggaucgagcacgacgucuggcgcauggagauauacgugagcuuaggcauuguagggcuggccauccucgcgcuucuggcaguuacaaguauuccuuccgugucugauagcuugaccuggagagaauuucacuauauccaauccaaacuaggaaucgucucacugcuccugggcacgauucaugcccuuauauucgcuuggaacaaguggaucgacauuaaacaguuugugugguacacuccaccgaccuucaugaucgccguguuucugcccauagucguuuugauuuucaagaguauccucuuccugccuuguuuaaggaaaaagauccugaaaauucggcacgguugggaggaugugacaaagaucaauaagacugaaauuugcagccagcuauga

SEQ ID NO: 2475 - RNA, 498 nt, Artificial Sequence
  CCDS32752.1 variant
augggcgcccccacccugccuccagcuuggcagccguuccucaaggaccacagaaucagcacauuuaaaaacuggcccuuccuugaggggugcgcauguacuccugaaaggauggccgaggcgggauuuauucauugcccaacggaaaaugagcccgaucuggcucaauguuucuuuugcuucaaggaauuggaggguugggagccugacgaugacccaauaggccccgggaccguggccuacgcauguaacacauccacuuuaggaggccggggugggcgcaucacccgagaagaacacaaaaagcauucuucaggaugcgccuuucugagugucaaaaagcaguucgaggagcuaacacucggcgaguuucugaaacuugaucgugaaagagcuaagaauaagauugcaaaagagaccaacaauaagaaaaaggaguucgaagaaacugccgagaagguuaggcgggcuaucgagcagcuggccgcgauggacuga

SEQ ID NO: 2476 - RNA, 429 nt, Artificial Sequence
  AAC51660 variant
augggcgcccccacccugccuccagcuuggcagccguuccucaaggaccacagaaucagcacauuuaaaaacuggcccuuccuugaggggugcgcauguacuccugaaaggauggccgaggcgggauuuauucauugcccaacggaaaaugagcccgaucuggcucaauguuucuuuugcuucaaggaauuggaggguugggagccugacgaugacccaauagaagaacacaaaaagcauuccucuggcugugccuuuuuaucagugaaaaagcaguucgaggagcugacccuaggggaguuucucaagcuggaucgggaacgcgccaaaaacaagaucgcaaaagagacaaauaacaagaaaaaggaguucgaagaaacugcuaagaaaguccgacgugcaauugagcagcuugccgcuauggacuga

SEQ ID NO: 2477 - RNA, 2931 nt, Artificial Sequence
  EAW56623 variant
auggagaagcagaaacccuucgcccuguuugugccuccaagaagcuccucuucacaagucagugcuguuaagccgcagacccucggcggggacagcacauucuuuaaauccuucaacaagugcacugaagaugacuuugaguuccccuuugcaaaaacgaaucuuucuaagaacggagaaaauaucgauucggacccugcccugcagaaggugaacuucuugccaguauuagaacagguggguaauucagauugucacuaccaagaaggccugaaagacagcgaucuagagaacagugaggggcucuccagggucuauucuaagcuguacaaagaagcggagaagauuaaaaaguggaaggugagcaccgaagcugagcuucggcagaaagaguccaagcugcaggaaaaucgcaaaauaaucgaggcccagcgaaaggcaauucaagaauugcaguuuggaaacgagaaaguuucacucaagcuggaagagggcauccaggagaauaaagaccugauuaaggaaaacaaugccacacgucaucucugcaacuuacugaaggagacuugugcuagaagugcagagaaaaccaagaaauaugaguacgaaagggaggagacacgccagguguauauggaucuuaauaacaauaucgaaaagaugauaaccgccuucgaggaauugcggguccaagcugagaacagcagacuggaaaugcacuuuaaacuaaaggaggacuacgagaagauccagcaucucgaacaggaguauaaaaaggaaauuaacgauaaagagaagcaagugucucugcuucugauccagauuacugagaaagaaaauaagaugaaggacuugacauuccuccuggaggaauccagggauaaaguaaaccaguuagaggaaaagaccaaacugcagucagagaaucucaagcaaagcaucgagaaacagcaccaucuuacgaaggaacuggaggacauaaagguuaguuugcagcggucuguguccacucagaaagcccuagaagaggaccugcaaauugcgaccaagacaaucugccagcucacugaagagaaagagacccagauggaagagagcaacaaggcacgcgccgcucacucguuugucgugacagaguucgaaaccacgguguguucucuggaggaacuucugcgaacugagcagcaaagauuggagaaaaaugaagaucagcucaagauucugacaauggaauuacagaaaaaguccucagagcuggaggaaaugaccaagcuaacuaacaauaaagaggucgaacucgaggaacugaagaaaguucuuggugagaaggagacauugcuguacgaaaacaaacaguucgagaagaucgccgaggaacucaaggggaccgaacaagagcugaucggacuucugcaggcaagggagaaagaagugcacgacuuggagauucagcucacggcuauaaccacaagugaacaauacuauagcaaggagguaaaagaucugaagacugaauuagagaaugagaaacugaagaacaccgaacuaacaucccauugcaauaagcucucucuggagaacaaagaacuuacucaggagaccagcgacaugacauuggagcugaagaaucagcaggaagauaucaacaauaacaaaaagcaagaggaacggaugcucaaacagauugagaaccugcaggaaaccgagacucaguuacguaaugagcuggaauacgugcgcgaggaacuuaagcaaaagagagacgaggucaaauguaaguuggauaaaucagaagagaacugcaauaaccucaggaaacagguggagaauaaaaacaaguauaucgaggaacugcagcaggaaaauaaagcccuaaagaagaaaggcacggcggagaguaagcaacugaacguuuacgaaauaaaagugaauaagcucgagcuggagcuugaauccgccaaacagaaguuuggcgagauuacagacaccuaucagaaggaaaucgaggauaaaaagaucagcgaggaaaacuugcuggaggaagucgagaaagcaaaggugauugcugacgaagccguaaaauuacaaaaggagaucgauaagcggugucagcacaaaauugcugagaugguugcccucauggaaaagcauaaacaccaguacgacaagauaaucgaggaacgagacucugagcuggggcuuuauaaaucaaaggaacaggagcaaaguagccugcgcgcauccuuggagauugaacucucuaaucugaaggccgagcuacugucggugaaaaagcagcucgaaaucgagagagaagagaaagagaagcugaaaagggaagcuaaggagaacacugcgacccuuaaggagaaaaaggauaaaaagacacagaccuucuugcuggaaacucccgagaucuacuggaaauuagacagcaaggcagucccuucccagacagugucacggaauuuuacgagugucgaucacggaauuucuaaagacaagcgcgauuaccucuggaccagcgccaagaacacucuguccacaccacuucccaaggcuuauaccgugaagacaccuacuaaaccaaagcugcaacagagagaaaaucuaaacauaccgaucgaggaaagcaaaaagaagaggaaaauggccuucgaguuugacauuaacucagauucuuccgaaaccacggaccuccugaguaugguuagcgaggaggaaaccuugaagacacuguaccguaauaacaaucccccugcaucucauuuaugcgugaaaacuccaaagaaagcccccuccucacucaccacaccugguaguacucugaaguucggcgcuauccggaagaugcgagaggauagaugggccguaauugcaaaaauggacaggaagaagaaacuuaaagaagcggagaagcuguuugucuga

SEQ ID NO: 2478 - RNA, 2931 nt, Artificial Sequence
  AAI44020 variant
auggagaagcagaagcccuucgcccuguuugugccuccaagaagcuccucuucacaagucagugcuguuaagccgcagacccucggcggggacagcacauucuuuaaauccuucaacaagugcacugaagaugacuuugaguuccccuuugcaaaaacgaaccuuucuaagaacggagaaaauaucgauucggacccugcccugcagaaggugaacuucuugccaguauuugaacagguggguaauucagauugucacuaccaagaaggcuuaaaagacagcgaucuggagaacagugaggggcuauccagggucuauucuaagcucuacaaagaagcggagaagauuaaaaaguggaaggugagcaccgaagcugagcugcggcagaaagaguccaaacuucaggaaaaucgcaaaauaaucgaggcccagcgaaaggcaauucaagaacugcaguucggaaacgagaaaguuucauugaagcucgaagagggcauccaggagaauaaagaccugauuaaggaaaacaaugccacacgucaucugugcaaccucuuaaaggagacuugugcuagaagugcagaaaagaccaagaaauaugaguacgaaagggaggagacacgccagguguauauggaucugaauagcaacaucgaaaagaugauaaccgccuuugaggaacuucggguccaagcugaaaauucuagauuggaaaugcacuucaaacugaaggaggacuacgagaagauccagcaucuagaacaggaguauaaaaaggaaauuaacgauaaagagaagcaagugucccuccugcuuauccagauuacugagaaagaaaacaagaugaaggaccugacauuuuugcucgaggaaucaagggauaaaguaaaucagcuggaggaaaagaccaaauuacagagcgagaaccugaagcaaaguaucgagaaacagcaccaucucacgaaggaacuugaggacauaaagguuucucugcagcgguccgugagcacucagaaagccuuggaagaggaccuacaaauugcgaccaagacaaucugccagcugacugaagagaaagagacccagauggaagagucgaauaaggcacgcgccgcucacucuuucgucgugacagaguucgagaccacgguguguucccucgaggagcugcuucgaacugagcagcaaagacuggaaaagaacgaggaucaguugaagauucucacaauggaacugcagaaaaagucaagugaguuagaggaaaugaccaagcugacuaauaacaaagaggucgaacuagaggaacucaagaaaguucugggugagaaggagacacuuuuguacgaaaauaaacaguuugagaagaucgccgaggaacugaaggggaccgaacaagagcucaucggacugcuucaggcaagggagaaagaagugcacgaccuggagauucaguugacggcuauaaccacaagcgaacaauacuauuccaaggagguaaaagaucucaagacugaacuggagaacgagaaauuaaagaauaccgaacugacaucucauugcaacaagcuaagccucgagaauaaagaacugacucaggagaccucagacaugacacuugaguugaagaaccagcaggaagauaucaauaacaauaaaaagcaagaggaacggaugcugaaacagauugagaaccuccaggaaaccgagacucagcugcguaacgaguuagaauacgugcgcgaggaacugaagcaaaagagagacgaggucaaauguaaacuugauaaaagugaagagaauugcaacaauuugaggaaacagguggagaacaaaaauaaguauaucgaggaacuccagcaggaaaacaaagcccugaagaagaaaggcacggcggaguccaagcaacuaaauguuuacgaaauaaaagugaacaagcuggagcucgagcuggaaagcgccaaacagaaguucggcgagauuacagacaccuaucagaaggaaaucgaggauaaaaagaucucugaggaaaaucuuuuggaggaagucgagaaagcaaaggugauugcugacgaagccguaaaacugcaaaaggagaucgauaagcggugucagcacaaaauugcugagaugguugccuuaauggaaaagcauaaacaccaguacgacaagauaaucgaggaacgagacucagagcucgggcuguauaaaaguaaggaacaggagcaaagcucccuucgcgcaucucuggagauugaauugucgaaccucaaggccgagcugcuaagcgugaaaaagcagcuggaaaucgagagagaagagaaagagaagcucaaaagggaagcuaaggagaauacugcgacccugaaggaaaagaaggauaaaaagacacagaccuuucuuuuggagacucccgagaucuacuggaaacuggacuccaaggcagucccuucacagacagugagucggaacuucacgucugucgaucacggaauuagcaaagacaagcgcgauuacuuauggaccuccgccaagaauacucucucaacaccacugcccaaggcuuauaccgugaagacaccuacuaaaccaaaacuucaacagagagaaaaccugaauauaccgaucgaggaaagcaaaaagaagaggaaaauggccuuugaguucgacauuaacucugauuccagugaaaccacggaccuacucagcaugguuucugaggaggaaacccugaagacauuguaccguaacaauaaucccccugcaucccaucugugcgugaaaacuccaaagaaagcccccucaaguuuaaccacaccugguagcacucucaaguuuggcgcuauccggaagaugcgagaggauagaugggccguaauugcaaaaauggacaggaagaaaaagcugaaagaagcggagaaacuuuucgucuga

SEQ ID NO: 2479 - RNA, 2931 nt, Artificial Sequence; identical to SEQ ID NO: 2477
  AAI26267 variant

SEQ ID NO: 2480 - RNA, 330 nt, Artificial Sequence
  AAI05300 variant
auggagaagcagaaacccuucgcccuguuugugccuccaagaagcuccucuucacaagucagugcuguuaagccgcagacccucggcggggacagcacauucuuuaaauccuucaacaagugcacugaagaugacuuugaguuccccuuugcaaaaacgaaucuuucuaagaacggagaaaauaucgauucggacccugcccugcagaacgugaauuucuugccaguauuagaacagguggguaacucagauugucacuaccaagagggccugaaggacagcgaucuagagaauagugaggggcucuccagggucuauucuaaacuguga

SEQ ID NO: 2481 - RNA, 1467 nt, Artificial Sequence
  BAF56181 variant
augagcguggccuucgcugcacccagacagaggggcaagggggagaucaccccugccgcgauucagaaaaugcuggacgauaacaaucaccucauacaaugcaucauggacucccagaacaagggaaaaacaucugaauguucacaguaccaacagaugcuucauacuaaucuggucuauuuggcuacgauugccgauaguaaccagaauaugcagagcuuacugccagcaccgcccacccaaaacaugccuauggguccaggcgggaugaaucaguccggacccccuccacccccucggucucacaacaugccaucggacggcaugguuggugggggaccgcccgccccucauaugcagaaucagaugaacggccaaaugccaggccccaaucacaugccuaugcaggggccaggacccaaccagcuaaauaugacaaacucaagcaugaauaugccgaguuccucucaugguagcaugggcggguacaaccacuccgugccuucaagucaaagcaugcccguacagaaccagaugacuaugucucagggacaaccaaugggcaauuaugguccucgccccaacauguccaugcagccaaaucaggggcccaugaugcaccagcaaccuccaucacagcaguacaacaugccgcagggaggcggccaacauuaucaggggcagcagcccccuaugggaaugaugggucaagugaaucagggcaaccacaugauggggcagcgacaaaucccacccuaccguccuccacagcagggacccccgcagcaauauagcggccaggaggauuacuacggugaccaguauagucaugggggccagggaccuccagaaggcaugaaucaacaguacuaucccgaugggcacaacgacuacggauaucagcagccuucuuaccccgagcaagguuaugauagaccauacgaagacuccagccagcacuacuaugagggcggaaauucgcaguacgggcaacagcaggaugcuuaucagggcccucccccacaacaggguuacccgccucagcagcaacaguaucccgggcagcagggcuacccaggacaacagcagggcuaugggcccucucagggagguccuggcccacaauaccccaacuacccucaggggcagggacaacaguauggcgguuacaggccgacccagccagggcccccucagccaccccaacagcggccuuauggcuacgaccagauuaugccgaagaaacccgcagaggaugaaaaugacuccaagggagucucagaggccaguggcccacagaacgacgggaagcaacuccauccucccggaaaagcuaauaucagcgaaaagauaaacaaacgcuccggcccaaagagagguaaacacgccuggacacauaggcugcgggagcgcaagcagcuugugaucuaugaggaaauuucugauccugaggaagacgaugaguga

SEQ ID NO: 2482 - RNA, 1374 nt, Artificial Sequence
  BAF56182 variant
augagcguggccuucgcugcacccagacagaggggcaagggggagaucaccccugccgcgauucagaaaaugcuggacgauaacaaucaccucauacaaugcaucauggacucccagaacaagggaaaaacaucugaauguucacaguaccaacagaugcuucauacuaaucuggucuauuuggcuacgauugccgauaguaaccagaauaugcagagcuuacugccagcaccgcccacccaaaacaugccuauggguccaggcgggaugaaucaguccggacccccuccacccccucggucucacaacaugccaucggacggcaugguuggugggggaccgcccgccccucauaugcagaaucagaugaacggccaaaugccaggccccaaucacaugccuaugcaggggccaggacccaaccagcuaaauaugacaaacucaagcaugaauaugccgaguuccucucaugguagcaugggcggguacaaccacuccgugccuucaagucaaagcaugcccguacagaaccagaugacuaugucucagggacaaccaaugggcaauuaugguccucgccccaacauguccaugcagccaaaucaggggcccaugaugcaccagcaaccuccaucacagcaguacaacaugccgcagggaggcggccaacauuaucaggggcagcagcccccuaugggaaugaugggucaagugaaucagggcaaccacaugauggggcagcgacaaaucccacccuaccguccuccacagcagggacccccgcagcaauauagcggccaggaggauuacuacggugaccaguauagucaugggggccagggaccuccagaaggcaugaaucaacaguacuaucccgaugggaacucucaguacggacagcaacaggacgcuuaucaggguccucccccacaacagggcuacccuccccagcagcaacaguauccagggcagcagggauacccgggccaacagcaggguuacgggccuucccagggcggacccggcccacaauaucccaauuacccucaggggcagggacagcaauaugguggcuacagaccaacccagcccgggccuccgcagccaccccaacagaggccuuauggauacgaucagauuaugccaaagaaacccgcagaggacgaaaacgauagcaagggcgucucggaggccucugguccucagaaugacgggaagcaacuccacccgcccggcaaagcuaacaucuccgagaagauaaauaaacggucaggaccaaagcgcggcaaacacgccuggacacauagacugagggaacggaagcagcuugugaucuaugaggaaauuagugauccugaggaggacgacgaauga

SEQ ID NO: 2483 - RNA, 1467 nt, Artificial Sequence
  BAF56183 variant
augagcguggccuucgcugcacccagacagaggggcaagggggagaucaccccugccgcgauucagaaaaugcuggacgauaacaaucaccucauacaaugcaucauggacucccagaacaagggaaaaacaucugaaugcucacaguaccaacagaugcuucauacuaaucuggucuauuuggcuacgauugccgauaguaaccagaauaugcagagcuuacugccagcaccgcccacccaaaacaugccuauggguccaggcgggaugaaucaguccggacccccuccacccccucggucucacaacaugccaucggacggcaugguuggugggggaccgcccgccccucauaugcagaaucagaugaacggccaaaugccaggccccaaucacaugccuaugcaggggccaggacccaaccagcuaaauaugacaaacucaagcaugaauaugccgaguuccucucaugguagcaugggcggguacaaccacuccgugccuucaagucaaagcaugcccguacagaaccagaugacuaugucucagggacaaccaaugggcaauuaugguccucgccccaacauguccaugcagccaaaucaggggcccaugaugcaccagcaaccuccaucacagcaguacaacaugccgcagggaggcggccaacauuaucaggggcagcagcccccuaugggaaugaugggucaagugaaucagggcaaccacaugauggggcagcgacaaaucccacccuaccguccuccacagcagggacccccgcagcaauauagcggccaggaggauuacuacggugaccaguauagucaugggggccagggaccuccagaaggcaugaaucaacaguacuaucccgaugggcacaacgacuacggauaucagcagccuucuuaccccgagcaagguuaugauagaccauacgaagacuccagccagcacuacuaugagggcggaaauucgcaguacgggcaacagcaggaugcuuaucagggcccucccccacaacaggguuacccgccucagcagcaacaguaucccgggcagcagggcuacccaggacaacagcagggcuaugggcccucucagggagguccuggcccacaauaccccaacuacccucaggggcagggacaacaguauggcgguuacaggccgacccagccagggcccccucagccaccccaacagcggccuuauggcuacgaccagauuaugccgaagaaacccgcagaggaaggaaaugauuccgaggaagucccagaggccucaggcccucagaacgacgggaaggagcucugucccccaggaaagccuacaaccagugagaaaauccaugaacgcagcggccccaagagaggugaacacgcuuggacucauaggcugcgggagcgcaaacaacuugugauauaugaagagaucuccgacccagaggaagaugacgaguga

SEQ ID NO: 2484 - RNA, 1374 nt, Artificial Sequence
  BAF56184 variant
augagcguggccuucgcugcacccagacagaggggcaagggggagaucaccccugccgcgauucagaaaaugcuggacgauaacaaucaccucauacaaugcaucauggacucccagaacaagggaaaaacaucugaaugcucacaguaccaacagaugcuucauacuaaucuggucuauuuggcuacgauugccgauaguaaccagaauaugcagagcuuacugccagcaccgcccacccaaaacaugccuauggguccaggcgggaugaaucaguccggacccccuccacccccucggucucacaacaugccaucggacggcaugguuggugggggaccgcccgccccucauaugcagaaucagaugaacggccaaaugccaggccccaaucacaugccuaugcaggggccaggacccaaccagcuaaauaugacaaacucaagcaugaauaugccgaguuccucucaugguagcaugggcggguacaaccacuccgugccuucaagucaaagcaugcccguacagaaccagaugacuaugucucagggacaaccaaugggcaauuaugguccucgccccaacauguccaugcagccaaaucaggggcccaugaugcaccagcaaccuccaucacagcaguacaacaugccgcagggaggcggccaacauuaucaggggcagcagcccccuaugggaaugaugggucaagugaaucagggcaaccacaugauggggcagcgacaaaucccacccuaccguccuccacagcagggacccccgcagcaauauagcggccaggaggauuacuacggugaccaguauagucaugggggccagggaccuccagaaggcaugaaucaacaguacuaucccgaugggaacucucaguacggacagcaacaggacgcuuaucaggguccucccccacaacagggcuacccuccccagcagcaacaguauccagggcagcagggauacccgggccaacagcaggguuacgggccuucccagggcggacccggcccacaauaucccaauuacccucaggggcagggacagcaauaugguggcuacagaccaacccagcccgggccuccgcagccaccccaacagaggccuuauggauacgaucagauuaugccaaagaaacccgcagaggaaggcaacgacagcgaggaggucccugaagccucggguccgcagaaugaugggaaggagcucugucccccaggcaagccuacaaccucugagaaaauccacgaacgguccggacccaagcgcggcgagcacgcuuggacucauagacugagggaacggaaacaacuugugauauaugaggaaaucucagacccagaggaagaugacgaguga

SEQ ID NO: 2485 - RNA, 336 nt, Artificial Sequence
  AAI05590 variant
augaagaccaacgacacauacaugaaauucagcuggcugacugugcccgagaagucccucgauaaagagcacagaugcaucgucaggcaugagaauaacaagaauggcguugaccaggaaauuauauuuccuccaaucaaaacggaugugauuaccauggacccgaaggauaacuguucuaaggacgccaaugauacacuucuguugcaauuaacuaacaccucagcuuauuacauguaucugcuacuccugcuuaaaaguguaguguacuucgcaaucauuacaugcugucuguugcggcgcaccgccuuuugcuguaauggggaaaagagcuga

SEQ ID NO: 2486 - RNA, 177 nt, Artificial Sequence
  AAG29337 variant
augcagauguuucccccuagcccacuguucuucuuucuccaacuucugaagcaguccucuagaagguuggagcacaccuucguguuuuuacggaacuucucacugaugcuacuccgcuacaucggcaaaaagcgacgugccacaagauuuugggacccgaggcgggggacucccuga

SEQ ID NO: 2487 - RNA, 1131 nt, Artificial Sequence
  AAF26776 variant
auggccaacagcgcuaauaccaacacagugcccaagcuguacagauccgucaucgaggacguuauuaaugaugugagggacauauuccucgaugacggcguagaugaacaggugcuuauggagcugaaaacuuugugggaaaacaaguuaaugcaaucucgggcagucgacggguuucacucagaggaacagcagcugcuacuccaggugcaacagcagcaucagccucaacagcagcagcaccaucaccaucaccaccaucaacaggcccagccacaacagacgguuccgcagcaggcgcaaacccaacaggugcugauccccgcuagucagcaggccacagcaccucaggucauugugccagauagcaaacuuauccagcacaugaaugccuccaacaugucugcugcagccacugcugccacccuggcguugcccgcaggaguaacaccuguucagcaaauucucaccaauucgggucagcugcuccaggugguccgcgccgcuaacggcgcccaguauaucuuccaaccacagcagucaguggugcuccaacagcaggucauaccccagaugcaaccugggggaguucaggcaccagugauccagcagguauuagcuccgcugcccggcgguauuagcccucaaacuggggugaucauucagccacagcagauccuuuuuacaggaaauaagacccaagucauacccacgacuguggccgcgccuaccccagcccaggcacagauuacagcuacuggccaacagcagccccaggcccaaccggcucagacccaggccccuuugguucuacagguggacggcacaggggauaccaguuccgaggaggacgaagaugaggaagaggacuacgaugacgacgaggaagaggauaaagaaaaggacggagcagaggauggucaagucgaagaggagccccugaacucugaagacgaugugagcgacgaggaaggccaggagcuguucgauacggaaaauguaguugugugccaguaugacaagauccaucgauccaaaaacaaguggaaauuucaccugaaggaugggauuaugaaucuuaacggacgugacuacaucuucucaaaagccaucggcgaugcugagugguga

SEQ ID NO: 2488 - RNA, 1173 nt, Artificial Sequence
  AAH00125 variant
augcccccuagcggccugagacuccuucuguuguuacugccacuacucuggcugcuugugcugaccccggggaggcccgccgcuggauuguccacaugcaagacuaucgacauggagcucgucaaacggaagcgcauugaagcaauacgaggucagauccugucuaaacugcgucucgccucaccuccaagucaaggcgagguucccccugggccauuacccgaagcggugcuggcucuuuacaacagcacgagagauaggguagccggagaguccgcagaaccugagccagagccggaagccgacuauuacgcuaaggaggugacccgggucuugaugguggaaacacacaaugagauuuaugauaaauucaagcagucuacucauucgaucuacauguuuuucaacaccucagagcugcgcgaagcaguucccgagccugugcuacucagcagagccgaacugaggcuucugcgguugaagcucaaagucgagcagcacguggaacuguaucagaaguacaguaauaacuccuggcgcuauuuaucuaaucgacugcucgcuccaagcgacucccccgaguggcuuucauuugauguaacaggcguugugagacaauggcugaguagggguggggagauugaaggauuccgguugagcgcccauuguucuugcgacucccgugauaacacccuacaggucgacaucaauggcuuuacuacaggccgcagaggggaucuggcgaccauacacggaaugaacaggccuuuccuccugcuuauggcaacgccacuggagcgggcccagcauuugcagucaagccgacaccgcagagcucucgacacuaauuacuguuuuaguucuaccgagaaaaacugcugugugaggcaacuguacaucgauuuccggaaggacuuagguuggaaauggauucacgaacccaagggcuaucaugccaauuuuugccuggggccguguccuuacaucuggucccuagauacacaguauagcaaggugcucgcacuguacaaccagcacaaucccggagcuucggccgcgccaugcugugucccucaggcccuugaacccuugccaauuguuuauuacgugggccgcaaacccaagguagagcaacugucuaacaugaucgugagauccugcaaauguucauga

SEQ ID NO: 2489 - RNA, 1704 nt, Artificial Sequence
  AAT70724 variant
augggcagagggcugcucaggggacuuuggccccugcacaucguguuguggacccggauugccagcacaauaccuccacauguccagaaguccguuaacaaugacaugaucgugacugauaacaauggugcuguaaaauucccgcaauuaugcaaguuuugugacgugcgcuucucuacgugcgauaaccagaaaucauguaugaguaauugcagcauuaccuccaucugugagaagccccaggaagucugcguggcaguuuggcguaaaaacgacgagaauauuacacuggaaacugugugucacgauccuaagcuaccauaccaugacuuuauccucgaggaugccgcgucucccaagugcauaaugaaagaaaagaaaaagccuggcgagaccuucuuuauguguucgugcucaagcgacgaguguaacgauaauaucauuuucagugaagaguauaacacauccaauccagaccugcuucuggucaucuuucaggugaccgggauuucuuugcugcccccucucggaguagcuaucagcguuauaauuaucuucuacugcuaucgagugaacagacaacagaaacuguccucaacuugggaaacaggcaagaccaggaagcucauggaguuuagugagcacugcgccauuaucuuagaagaugaccggagcgauaucucuuccacgugugcaaauaacauuaaucauaacacugagcugcuuccaauagaauuggacacccuggucgguaaagggcgcuucgccgagguguacaaggcuaaacuaaagcagaacacaucagaacaguuugagacuguggcagucaaaaucuucccguaugaggaauacgccagcuggaagaccgagaaagacauuuuuagugauaucaaucucaagcacgaaaacauacugcaauuccuuacagcugaggaaagaaagaccgagcugggaaaacaguauugguugauuacggccuuccacgcgaagggcaaucuccaggaguaccugacuaggcauguuaucucuugggaagacuuacggaaacugggcuccagccucgcacgcgggaucgcccaccuucauucggaucacacacccugcggacgaccuaagaugccaauugugcacagagaccugaaaucuuccaacaucuugguaaagaaugaucuaaccuguugccugugugacuuuggucucucacugaggcuugaucccacucugaguguggacgauuuggcuaacagcggccaggucgggacagcccgguacauggcaccugaggugcucgaaucccguaugaaucuggagaacguugaaucuuucaagcaaaccgacguguauagcauggcuuuaguccugugggagaugacgucacgcugcaaugccgugggagagguaaaagauuacgaaccacccuuuggcaguaagguuagagagcauccguguguggaauccaugaaagacaacguccuaagggaccggggucgaccugagauucccagcuucuggcucaaucaccaggggauacagauggugugcgagacccugacagaauguugggaucaugacccagaggcgcgccuuacugcccaaugcgucgcagaaagauuuucugaguuggaacaccuggauaggcucucaggacggaguuguagcgaggagaagaucccugaagacggcucccugaacaccacaaaauga

SEQ ID NO: 2490 - RNA, 2055 nt, Artificial Sequence
  BAG35778 variant
augauggacgccagcaaggagcugcaagugcuccacaucgauuuccuuaaccaagacaaugcugucucccaucacaccugggaauuucagacaucuucacccguuuucagaaggggccagguguuucaucugcgguugguauuaaaccagccuccacaaaguuaccaccagcugaaacuagaguucagcacugggccgaaucccuccauugcaaagcauacgcucgugguccuggauccucgcaccccaucugaccacuauaacuggcaggccacacuucagaaugaaucgggaaaagaggugacuguugcggugaccucaagccccaacgcuauacuggguaaguaccaauugaaugucaaaacaggcaaccacauccucaagagugaagagaauauucuguaucugcucuuuaacccuuggugcaaggaggauaugguguucaugccagacgaagaugagcgaaaagaauacaucuuaaaugacaccgggugucauuauguaggagccgcacguuccauuaagugcaaacccuggaacuuuggccaguucgagaagaauguucuggauuguugcaucucucuuuugacugagagcucccugaaaccuacagacagaagggauccagugcuagucugucgggccaugugcgcuaugaugucauuugaaaagggucagggggugcucauaggaaacuggaccggcgacuacgagggcgggacggcaccguauaaguggacuggaagugcccccauccugcagcaauacuacaauaccaaacaggcuguguguuucggucagugcugggucuuugccggcauucuuacaacuguucugcgcgcguuggggaucccugcaagaagcgugaccggauucgauucugcccacgacacagaaaggaaccucaccguagacacguaugugaacgagaauggcgaaaagauuacuuccaugacacaugauucagucuggaacuuucacguguggaccgacgcuuggaugaaacggccagaucugcccaaggguuacgacggguggcaagccguugaugcaacuccucaggagcgcagccagggaguguucuguugcggcccaagucccuuaacagcuauccgaaaaggcgacauauucauugucuaugauaccagauuuguguucucugagguaaauggggacaggcugaucuggcucguuaagauggugaacggacaggaggaacuucacgucauuuccauggaaacgaccagcaucgguaaaaauaucucgacaaaggccgugggccaagaucggcgucgcgacauuacuuacgaguauaaguacccggaagggucuuccgaggagagacaggucauggaucaugcguuucuguugcuaucaagugaaagggagcaccggcgaccugugaaagaaaacuuccugcauaugagcguucaguccgacgacgugcuccugggaaauucuguaaacuuuaccgucauacuuaagcgcaaaacagccgcacugcagaaugugaacaucuugggcagcuucgagcuccaacuguauacugguaagaaaauggcuaaguuaugugaucugaauaagaccucacagauucaggggcagguuagugaagugacacuaacccucgacuccaaaacuuacaucaacagccuggccauacuugaugacgagcccgucauuagaggcuuuaucaucgcugagauuguggaaucuaaggagaucauggccucagaaguauucacgaguuuucaauacccagaguucagcauugaguugccuaauacaggaaggauaggccagcugcucgugugcaacugcaucuuuaaaaauacccuggcaauuccccuuacugauguuaaguucucccuggaaucuuuggggaucucgagccuccagaccuccgaccacggaacaguccagccaggugagaccauccaaucacagauuaaauguacucccauaaagacaggcccuaagaaauuuaucgugaagcugaguucuaaacaggugaaggaaauuaacgcccagaaaaucgucuuaauuacgaaguga

SEQ ID NO: 2491 - RNA, 3375 nt, Artificial Sequence
  CCDS6519.1 variant
auggacagccuggccucccucgugcuuugcggcgucucucuguuguuaucagggaccguugagggagcuauggaucugauccuaauuaacagucucccccuggugagcgacgcagaaacaucccuuacuuguauagccucugguuggagaccucacgagccaaucacgauuggcagggauuucgaagcgcugaugaaucagcaucaagacccguuggagguaacccaggaugugacacgggaaugggcuaagaaagucguguggaagcgcgagaaagccucgaagaucaacggggcauacuuuugcgagggacgaguucguggcgaagccauuagaaucaggacuaugaaaaugcggcagcaggcuucauuccuccccgcaacccugacaaugaccguggacaagggugauaaugucaacaucagcuuuaagaaagugcugauaaaggaggaagacgccguaauuuauaaaaaugggaguuucauccacuccguuccucgccaugaggugccagauauucucgagguccacuuaccccaugcucaaccucaggacgccggaguguacucugcgagauauaucggcggcaaccuguuuacuagcgcauucacaaggcuuauagugcggcgcugugaagcccagaagugggggccagagugcaaucacuuguguaccgcuugcaugaacaauggagucugucacgaagauacgggugagugcauuugucccccuggcuuuauggggcgaacuugcgaaaaagccugugagcugcauaccuucggaagaacaugcaaggagaggugcuccggccaggaagguuguaagucauacguguuuugccuaccagacccguauggguguaguugcgcaacuggauggaaaggccuccaauguaacgaggcuugccaccccggcuucuacgggccugauuguaagcugcggugcagcuguaauaacggagaaaugugcgaccguuuucaggguugucuuugcucuccaggcuggcaggggcugcagugcgagcgcgaaggaauccaaagaaugacccccaaaauuguugacuugccugaucauaucgagguaaauuccggcaaguucaacccaaucuguaaagccucagguuggccccucccgacaaaugaggaaaugacccuggugaagccugacgggacggucuuacaccccaaagauuuuaaccacacugaccauuucagcguggcgauuuucacaauacacaggauccugccaccugauaguggcguuugggugugcucugucaacaccguggccggaaugguagagaagcccuuuaauauuuccguuaaggugcucccaaaaccccuuaacgcaccuaaugucaucgacacuggccauaacuucgcugugauaaauauuagcucggaaccauauuuuggggauggaccgaucaagucuaaaaagcuguuguacaaacccgucaaccacuacgaggccuggcagcauauccaggugacaaaugaaauuguuacccuaaacuaucuggagccucggacggaguacgaacucugugugcaacugguacgacgcggugagggcggggaaggacacccaggccccgucagaagguucaccacagcuuccaucggucuuccuccaccccgggggcugaauuugcucccgaagucacagacuacccugaacuuaacauggcagccuauuuuuccaaguagcgaggacgauuucuauguggagguugaacgcagauccgugcagaagucugaccaacagaauauaaaaguccccggcaaccugacuagcgugcuacucaauaaccugcacccuagggagcaguacguagugcgugcccggguuaauaccaaggcacagggagaauggucagaggaucuuacagccuggaccuugagugacauccugcccccacaaccugaaaacauuaaaaucuccaacaucacucauagcucugcugucauuucauggacgauacucgacggcuauaguaucagcuccauuacaauccgauacaaggugcaggggaaaaaugaggaucagcacguggacgucaagauuaagaacgcgaccaucacucaguaucaacugaaaggacuugagcccgaaaccgcauaccagguugauauauuugccgagaauaacaucgguucuucgaauccagcuuucagccaugaacuggugacauugccggagucccaggccccugcagaccucggcgggggaaagaugcuguuaauugccauccugggcucagcugguaugaccugccuaacugugcuccuggccuuucuuauuaucuugcagcugaaaagagcaaacguacaaaggcgcauggcgcaggcuuuccagaauguccgggaagaacccgccgugcaauuuaacagugggacacucgcacugaauagaaagguuaaaaacaauccagaucccacgauauacccuguguuagacuggaacgauauuaaguuccaggacgucaucggcgagggaaauuuuggccaggugcugaaggccaggauuaaaaaggaugggcuucgcauggacgcugccaucaaacgaaugaaggaauaugcaucuaaagaugaccaccgggauuucgcuggagaguuggaaguucucuguaagcugggccaccauccaaacauaaucaaucuacugggugccugcgagcaccguggguaccucuaucuggcgauugaauacgcuccccauggaaaccuuuuggacuuccugagaaaaagcaggguguuagagaccgacccugccuuugcaaucgccaacuccacugcuucaacacucagcucucagcaacugcuucacuucgccgcagauguagcgcgcggcauggacuaucugucccagaagcaguuuauucaucgggauuuggccgcuagaaauauccucgucggugagaacuacguggccaagauagcagacuucggccugaguagggggcaggaaguguaugucaaaaagaccaugggacgacuaccgguucgcuggauggcuauugagagccugaauuacucuguguacacaacuaacuccgauguauggucauauggcgugcuccugugggaaaucgucagucuugggggaaccccauacuguggcaugacgugcgccgaguuguaugagaaacugccccaagguuaccgguuagaaaagccucucaauugugacgaugagguguaugaccugaugagacagugcuggagggaaaaaccauacgagcgucccagcuuugcacagauccuuguuucgcugaaccgcaugcuagaggagcggaagaccuaugugaauacaacucucuacgagaaguucaccuacgccgggauugauuguuccgcugaagaggcggccuga

SEQ ID NO: 2492 - RNA, 1791 nt, Artificial Sequence
  BAF84950 variant
auggccgacgcugaggcaagagccgaguuccccgaggaagcgaggccugaucggggcacccuccaggugcugcaagacauggcuagccgccuucgaauccacuccauucgugccacaugcucuacuucaagugggcauccaacgagcuguuccucuucgucagagauaaugagcguccuguuuuucuacaucaugagauauaagcagagugauccggaaaaccccgacaaugauagguuuguuuuggcaaaacgguuauccuucguggacguagccaccggauggcugggucagggccuagggguggcuugcggaauggcauacacaggcaaguauuuugaucgcgccucuuacagagucuucugucucaugagcgacggugaguccucagaggggagugugugggaagcuauggccuuugcgagcuauuacucucuggauaaccuuguugcaauuuucgacgugaauaggcugggacacuccggcgccuugccugcugagcauugcaucaacauuuaucagcggcgcugugaagccuuuggcuggaauacuuacgucguggaugggcgagacguagaggcacucugccaaguuuucuggcaggcuucacaggugaaacacaagccaaccgccgucguggcgaaaacauuuaagggaagagguacccccagcaucgaggaugccgaaaguuggcaugcaaagccuaugccaagggagcgggcugacgccauaaucaaacugauugaaucucagauccaaacuucccguaaccuggacccccagccuccaauugaggauagcccggaagugaauaucacagacguccgcaugaccucgcccccugauuacagaguuggcgacaagauagcuacgaggaaagccugugggcucgcauuagccaagcugggauaugcuaacaaucgggugguagugcuugauggcgacacucgauacucuaccuucuccgagauuuuuaacaaagaguauccagaacgcuucaucgagugcuucauggcggaacagaauauggucucaguggcauuggguugugccaguagagggaggacaauugcuuuugccagcacuuucgcagccuuucugacccgggcuuucgaucacauccgcaucggaggccuagccgaguccaacauuaauauaaucggcucucacugcgggguuagcgugggagacgauggugcaucacagauggcgcucgaagacauugcuauguuuagaacaauccccaaguguaccauauucuacccuacggaugccgucaguacugagcaugcaguggcccuggcugccaacgcaaagggcaugugcuuuauuaggacaacccguccagagacuaugguaaucuauacaccccaagaacgguucgagaucgggcaggcuaaaguucuucgacacugcguguccgacaaggucaccgugauuggagccggcaucacggucuacgaagcgcuggccgcugcagacgaguugagcaaacaggauauuuuuauaagagugaucgaccucuucaccauuaagccgcuggauguugccacaaucgugucuucagcuaaagccacugaagguaggaucauuaccguagaggaccauuauccucaagggggcauaggagaggcagucugugcggccgugaguauggaucccgacauccagguucacagcuuagcuguguccggcgucccacagucugggaagucggaagaacugcucgauauguacggaauuagcgcccgccacaucauuguggcaguaaaaugcaugcuucugaauuga

SEQ ID NO: 2493 - RNA, 861 nt, Artificial Sequence
  EAW88722 variant
auggccgaggacggcgaagaggcugaguuccacuuugcagcccuguacaucagcgggcaguggcccagacucagggcggauaccgaccuucaacggcugggauccucugcuauggccccuucacgcaaguucuuuguggguggcaacuggaaaaugaaugggcgaaagcagaguuugggagaauuaauuggcacacugaacgcagccaaagucccagcugauacugaaguugugugcgcaccgcccacggccuauauagacuucgcucgucagaagcuagauccuaaaaucgccguagcggcacagaauuguuacaaggugaccaacggugccuuuacaggggagauuagcccaggaaugaucaaggacugcggcgcuacuugggucgugcucggccauuccgagagaaggcacguuuucggggaaucugaugagcugauuggacaaaaaguggcccaugcacuugcugaaggucugggcgucaucgccuguauaggggagaaguuggacgagcgggaagcgggaaucaccgagaaagugguauuugaacagacaaagguuauugccgauaaugugaaagacuggucgaaggucgugcucgcauaugagcccgugugggcuaucggcaccgguaagacugccacaccucagcaggcucaagaaguccacgagaaacugcgcggguggcugaagucaaacguuagcgaugccguggcacagaguaccagaauuaucuacggaggcuccguaacgggcgccacuugcaaagagcucgcuucucagccagacguggauggguucuuagucggaggugcgagccugaagcccgaauuuguggacauaauuaaugcaaaacaguga

SEQ ID NO: 2494 - RNA, 357 nt, Artificial Sequence
  CAA72108 variant
augccccugguggucgccguuaucuucuuuagccucuggguguucgcucuuggccagcuggagcaaccugaaauuuccauaucuagaccagcaaacaagucagcccacaucaguuggaaagcgagcauucagggguuuuccucuaagaucauucauugguacuggcagaaaccgaauaagggauuggaguauuuacugcacguauuccuaaccaucucggcucaggacugcucagguggcaaaacaaagaagcucgaagugagcaaaaacgcccauacgaguacuuccacccugaagauaaaauuucuugagaaggaagaugaggucguguaccacugugcaugcuggaucaggcau

SEQ ID NO: 2495 - RNA, 414 nt, Artificial Sequence
  EAL23985 variant
augcugagccuccuucacaccuccacacuggccguguugggcgcuuuaugcgucuacggggcaggacaucuggagcagccccaaaucucuucaacuaagacgcuaaguaaaaccgccagacucgaauguguugugagcgguauuacaauauccgcgacuucuguauauugguacagggagcggccuggcgaagugauccaguuccuggucucgauuucauaugacgggaccgugcgcaaggagagcggaaucccaaguggcaaauuugaaguugaucguauuccggagacauccaccucuacucuuacaauccacaacguggagaagcaggacauagcuaccuacuauugcgcccugugggaaguccauagcucccgacaguucgagcccucacacaguaucaauguguacuga

SEQ ID NO: 2496 - RNA, 366 nt, Artificial Sequence
  CAA30181 variant
augcugagccuccuucacaccuccacacuggccguguugggcgcuuuaugcgucuacggggcaggacaucuggagcagccccaaaucucuucaacuaagacgcuaaguaaaaccgccagacucgaauguguugugagcgguauuacaauauccgcgacuucuguauauugguacagggagcggccuggcgaagugauccaguuccuggucucgauuucauaugacgggaccgugcgcaaggagagcggaaucccaaguggcaaauuugaaguugaucgaaucccggagacauccaccucuacucuuacaauucacaacguggagaagcaggacauagcuaccuacuauugcgcccugugggaaguc

SEQ ID NO: 2497 - RNA, 366 nt, Artificial Sequence
  CAA33345 variant
augcugagccuccuucacaccuccacacuggccguguugggcgcuuuaugcgucuacggggcaggacaucuggagcagccccaaaucucuucaacuaagacgcuaaguaaaaccgccagacucgaauguguugugagcgguauuaagauauccgcgacaucuguauauugguacagggagcggccuggcgaagugauccaguuccuggucucgauuucauaugacgggacugugcgcaaagagagcggaaucccaaguggcaaguuugaaguugaucgaaucccggagaccuccacaucuacccuuacuauucacaacguggagaaacaggacauagcuacauacuauugcgcccugugggaaguc

SEQ ID NO: 2498 - RNA, 2382 nt, Artificial Sequence
  AAA93251 variant
augauggccgcucuguaccccagcaccgaccucuccggcgcaucuucaaguagccuuccuuccucuccaucgucaagcaguccgaacgaggugauggcccugaaggaugucagagaaguuaaagaggaaaauacauugaacgagaaguuauuccugcuagcgugcgacaaaggggauuauuacauggugaagaaaauccucgaagaaaauuccucuggagaccugaacauuaauuguguagaugugcuugguaggaacgcugucacuauaacgaucgagaaugaaaaccuggacauuuugcagcuccugcuggauuauggcugccaaagcgccgacgcacucuuaguggccaucgauuccgagguugugggggcugucgacauucugcuuaaucaccggcccaagcgcucaagucgaccuaccaucgugaaguugauggaacguauacagaacccagaguacagcacaacuauggauguagcacccguuauccuggccgcucauagaaauaacuaugagauucuaaccaugcuccugaaacaggacgugucucuuccuaagccacacgccgucggaugugaaugcacacuguguuccgcgaaaaauaagaaagauucauugaggcauagccgguuucgccucgacaucuacagaugccuggcaagucccgccuuaauuaugcugaccgaggaagacccuauccucagggcuuucgagcuuucugccgaucugaaggaauugucccuaguggagguggaguuucggaacgacuaugaggagcuggcacgccaguguaagauguucgcuaaagaucuccuggcccaagcgcgaaauagcagagaacuugaggucauacugaaccacacuucgucugacgaaccauuggauaagaggggccuccuggaggagcggaugaacuuaucccgucugaaacuagccauuaaguacaaucagaaagaauuuguuucacagaguaacugccagcaauuccucaauacagugugguuuggucagaugagcggguaccgcagaaagccgaccuguaaaaagaucaugacgguacugacugugggaauuuucuggcccguccuuuccuugugcuaucugaucgcaccuaagucucaguuuggcaggaucauucauaccccauucaugaaauuuauaauccacggcgcuagcuacuucacauuucuccugcuucugaacuuguauucacucguguacaaugaggacaagaaaaacacuauggggcccgcccuggaacggauugauuauuuacugauccuauggauaauuggaaugaucuggagugacaucaagcgacucugguacgagggucuggaagauuuccuugaggagucccgcaaucaguugagcuucguuaugaacucucuguaucucgcuaccuuugcccugaaaguggucgcacacaauaaguuccaugacuuugccgauagaaaggacugggacgcuuuccacccuacauuaguggcggaaggccuguuugcauucgccaacguacuuucauacuugaggcucuuuuucauguacaccacgaguagcauucuggggccacuacaaaucuccaugggacagaugcugcaggauuuuggcaaauuccucgguauguuucugcuuguuuuguucucuuuuacuauugggcugacacaauuauaugacaagggauacaccucgaaagagcagaaggauugugugggcauauucugcgaacagcagagcaaugacacuuuccauuccuuuaucggcacaugcuucgcucucuuuugguauauuuucucacuggcccacgucgcaaucuuugugacccgguucaguuacggggaggagcuucaaucuuuugucggagccgugaucguugguacguauaacgugguagucgugauuguucugaccaaauugcucguggcuaugcugcacaagagcuuccagcuaauagccaaucaugaagauaaggaguggaaauuugcacgcgcgaagcuguggcucuccuacuucgacgauaaauguacacugcccccgccuuuuaacaucauucccucaccaaagacuaucugcuauaugauuagcucucuuuccaaauggaucuguagucacaccagcaagggcaaggucaaaagacaaaauucuuugaaggaauggaggaaccugaaacagaagcgugacgagaacuaccagaaagugaugugcuguuuaguacaucgguaccucacauccaugcgacagaagaugcagucaacugaucaggcuaccguggaaaaucugaacgagcuuagacaagaccugaguaaauucaggaaugagauacgcgaucuacucggguuucggacaagcaaguaugccauguucuacccuagaaacuga

SEQ ID NO: 2499 - RNA, 3315 nt, Artificial Sequence
  AAZ73614 variant
augagcuucagagccgcuaggcuguccaugcggaaccgccgaaaugacacccucgauucuacacguacucuuuacucaagugcaagcagauccacggaccugucuuauucggagucagauuuggugaacuuuauccaggccaauuucaagaaaagggaaugcgucuuuuucaccaaggacagcaaagcgacagagaacguuuguaagugcggcuacgcucaaagucagcacauggaagggacucagauuaaucaguccgagaaauggaacuauaagaagcauaccaaagaauuucccacagaugccuucggagacauacaauuugagaccuuagguaagaaaggcaaguacauccggcugucuugugauacugacgcagagauucuauaugaacuccugacacagcacuggcaucuuaaaaccccuaaucuggugaucagcguaacugggggagccaagaacuucgcuuugaagccacgcaugagaaaaaucuuuuccaggcucauuuacauagcacagucaaagggcgccuggauccugacgggugggacccacuauggacugaugaaauacauuggcgaggugguccgggauaauacaaucagucgcagcucugaagagaacauuguggcuaucggcauagccgcgugggggaugguuuccaaucgagacacucucauuagaaacugcgaugcagagggauacuucuuagcccaguaucugauggacgauuuuaccagggacccgcuuuacaucuuggacaauaaccauacacaccuucuacucguggauaaugguugucacggccaucccaccgucgaagcuaagcugcggaaccaacuugagaaauauauuucagaacguacgauccaggacagcaacuacgggggaaagaucccuauugugugcuucgcccagggcggugggaaagagacucugaaggcaauaaauacaaguaucaagaacaaaauuccauguguaguuguggaaggaucuggccagaucgcugaugucauagccuccuugguggagguggaggacgcgcucaccagcucggccgucaaggaaaaacugguucgcuuuuuacccagaacugugucuaggcugccugaggaagagacagaauccuggauuaaguggcucaaagagauccuugagugcucacaccuguugaccguaaucaagauggaagaggcaggcgaugaaauugugaguaaugcuaucagcuaugcccuauacaaggcuuucuccacgucugagcaagacaaagauaacuggaaugggcagcugaagcuccugcuugaauggaaccagcuggacuuggccaaugaugagauuuucaccaacgaccggcgaugggagagcgcagaucuccaagaagucauguuuacagcccugauaaaagaccgcccaaaguucgugagauuauuucuggagaauggacuaaaccucaggaaauuccugacucaugacguucuuaccgaauuguuuucaaaucacuucaguacacugguguaucggaaccuccagaucgcuaaaaauuccuacaacgaugcgcugcuuacuuuugucuggaagcugguggcaaauuuccgcagagguuuuaggaaggaggaccguaacggccgggaugagauggacauugaauugcacgauguaagccccaucacccgacauccucuccaggcccuguucaucugggcuauuuuacagaacaagaaagagcugucuaagguuauaugggaacaaacaagaggguguacccuagccgcacucggagccucaaaacugcuuaagacuuuggcuaaggugaaaaaugacaucaacgccgcaggcgagagugaggaacuggcgaaugaguacgaaacgagggcugucgagcucuuuacagaaugcuauagcuccgaugaggaccuggccgaacaguuacugguguacucuugugaggcauggggugggucgaacugccuugaguuggccgucgaagcuaccgaucagcacuucauugcccagccaggcgugcaaaauuuucucagcaagcagugguauggagagaucucccgcgacacuaaaaacuggaagauuauccugugccuauucauaaucccgcugguuggcuguggguucgugucauuucggaaaaagcccguagauaaacauaagaagcuccugugguacuaugucgcauucuuuaccaguccuuucgugguguuuucuuggaauguugucuucuacauugcuuuucuuuugcuguucgccuauguguuacucauggacuuucacagcguaccacaucccccugaacuggugcuuuacucccugguuuucgucuuguuuugcgaugaggugagacagugguacgugaacggagucaauuauuucacagaccucuggaacguuauggacacccugggucuauuuuacuucaucgcgggcauuguguucaggcugcacucaagcaauaaaucuucccucuauagugggcgcgugaucuuuugucuggauuacauaauuuucacucuucgauugauccacauuuuuacaguaagccggaaccugggaccaaagaucauaauguuacagcguaugcucaucgacgucuucuuuuuccuguuucuuuucgccguguggaugguugcuuuuggcguggcaagacaagguauucugaggcagaaugaacagcgcuggcgguggaucuucagaucugucauuuaugagcccuaccuagccauguuuggccaggugccguccgauguugacgggacgaccuaugauuucgcucauugcacuuucacaggaaacgagucaaaaccucucuguguggaacuggacgagcacaauuugcccagguuuccagaauggaucaccauaccucugguaugcauuuacauguuaaguacaaacauccuccuggucaaccuucugguggccauguucggcuacacuguggggaccguccaagagaauaacgaucagguuuggaaguuucagcgauauuucuuggugcaagaguacuguagccgccucaauauccccuuuccauucauuguauuugcauauuucuacaugguggucaaaaagugcuuuaaguguugcuguaaagaaaagaacauggagucguccgugugcugcuucaaaaaugaagacaacgagacgcuggcgugggaaggaguuaugaaggagaauuaucuagugaaaaucaacaccaaggccaaugauacaucugaggaaaugcggcauagauuuaggcagcuggacacuaagcugaacgaucucaaaggucuguugaaggagauugcuaauaaaauaaaguga

SEQ ID NO: 2500 - RNA, 2097 nt, Artificial Sequence
  AAK13079 variant
augaugagaagcagguccaagucuccccggcgcccuucaccaaccgcccgaggcgcuaacugcgacguggagcugcucaaaacaacuacgcgugauagagaggaacuuaaguguaugcuggaaaaauacgagaggcacuuggcagaaauccaggggaaugucaagguuuuaaaaagugagcgggacaagauuuuccugcuauaugagcaagcccaggaagagauaacccgccucagaagggaaaugaugaaguccugcaaauccccgaagucuacaacugcgcaugcuauccugcggcgcguggagaccgagcgagauguagccuuuacagaccuuagaaggaugaccacugaacgggauucgcugcgugagcgcuugaaaauugcacaggaaacagccuucaacgagaaggcucaccucgaacagagaaucgaggagcuggaauguaccgugcauaaucuggacgaugagaggauggaacaaaugucaaacaugacgcucaugaaagagacuauuagcaccgucgaaaaggagaugaagaguuuagcacggaaagccauggacacagaguccgaacugggacgacagaaggcugagaauaacucucuucgcuugcuguacgaaaauacugagaaagaucuaagcgacacccagagacaccucgccaagaaaaaguaugaacugcagcuuacacaagagaaaaucaugugccuggaugagaagauagacaacuuuaccaggcagaauaucgcgcagcgggaagagauuuccaucuuggguggcacgcucaacgaucuggcaaaggaaaaagaguguuuacaggccugccuggacaagaaaucagagaauauugcuagucucggggaaagccuugccaugaaggagaaaacuaucucuggaaugaagaacauaauugcagaaauggagcaagcuagccgccaguguacagaagcccugaucgugugcgagcaggacguuucaagaaugaggcgucaauuggaugagaccaaugacgaacuagcgcagauugcccgggagcgagauauccuggcacaugacaacgauaaucuccaggaacaguucgcuaaggccaaacaagagaaccaggcucugagcaagaaacuuaacgacacucacaaugaacugaacgauaucaagcagaaagugcaggacacaaauuuggaggucaacaagcucaagaauauucugaaaagugaggaaucugagaacagacaaaugauggaacaguuaaggaaggccaaugaggaugcagaaaacugggagaauaaagcccgccaguccgaggcugacaacaauacccugaagcuagaacucauaacggcggaggcagaaggcaaccggcugaaagagaagguggauagccuuaauagagagguagaacagcacuugaacgccgagaggucguacaagucucaaaucuccacccugcauaaaucaguugugaagauggaagaggaacuccagaaaguccaguuugagaaggugagugcucuggccgaccuuagcuccacacgcgagcuguguauuaaauuggacucuagcaaggaacuccugaaucgacaguuaguggcaaaagaucaagagaucgaaaugcgggagaacgaacuggacucagcccacagugagauagagcuacuccguucccagauggcuaacgaaagaauuagcaugcagaaucuggaggcccuuuuggucgcaaacagggauaaggaauaucaaucucagaucgcgcugcaggagaaggaaucagagauccagcuccugaaagagcauuuaugccuggcugaaaauaagauggccauucaaagucgcgacguugcacaguuccggaacgugguaacucagcuugaggccgauuuggacaucaccaaaagacagcucgguacagaaagguuugagcgagagcgcgcugugcaagaacugcggagacagaauuacagcuccaacgccuaucacaugucuucgacuaugaagcccaauaccaaaugucacagcccugagagggcacaucaccguuccccagaucgcgggcuagaccggucacuggaagagaaccucugcuacagagauuucuga

SEQ ID NO: 2501 - RNA, 927 nt, Artificial Sequence
  CCDS48205.1 variant
augagacccgagggcagccugaccuacagggugccugaacggcuccgccagggguucugcggagucggucgagccgcucaagcacuuguuugugccuccgcgaaggagggcacagcuuuucguauggaagccgugcaggagggggcagccggaguagaaucugagcaggcugcacugggcgaggaagccguguuguuacuggacgauaucauggcugaggucgaagugguugccgaggaggaaggucuaguggagagaagggaagaggcgcagcgggcacaacaggccgucccagggccgggacccaugacuccugaaucagcuccagaggagcuccuggccgugcagguagaacuugagcccguuaacgcacaggcucgcaaagccuucaguagacaaagggaaaagauggagcggcgccgaaaaccucaccuggacagaaggggcgcggugauucagagcgucccaggcuuuugggccaaugugauagcaaaccauccccagauguccgcuuugaucacggaugaagacgaggauaugcucucuuauauggugucgcuggaggucggggaagagaagcacccuguucaucugugcaaaauuauguuauucuuucggucaaauccauacuuccagaacaaggugaucaccaaggaauaucucguaaauauuacagaguaccgugccagccacaguacuccgaucgaaugguaucccgacuacgagguggaggcuuaucgcagaaggcaucacaacuccucucugaacuuuuucaauugguuuagcgaucacaauuucgccggauccaacaaaauagcagaaauccuuuguaaggacuuguggcggaauccucugcaauacuacaaacgaaugaagccacccgaggaagguaccgagacaucaggcgauagucagcuacucagcuga

SEQ ID NO: 2502 - RNA, 369 nt, Artificial Sequence
  M13231.1 variant
augagaugggcccugcucgugcuucuggcuuucuugagccccgcaucccagaagucuucaaacuuagagggcaggaccaaaagugucacacggcaaacugggagcuccgccgaaaucacgugcgaccugaccguuacaaauacuuuuuacauucacugguaucuacaucaggagggaaaggcgccucagcgccuccuguacuaugaugugucuaccgcucgagacguacuugaaucgggucugucaccaggcaaauacuauacacacaccccgcguagauggagcuggauauugaggcuccagaaccugaucgagaaugauagugggguguacuauugugccacuugggaccggcaaaagcugcucuga

SEQ ID NO: 2503 - RNA, 804 nt, Artificial Sequence
  CCDS12619.1 variant
augggcgccagacagauccaaaccagcuccucucagacaucaccagaggaagcuauggggacuccuaggauucagcaucugcucauacuucugguguugggagcaaguuuacugacgagcggucuagagcucuacugccagaagggccuguccaugaccgucgaagccgacccagcgaacauguucaauuggacaacugaggaaguugagaccugugauaaaggggcucuuugccaagagacaauccugauuaucaaggccggaaccgaaacugcaauuuuggccacaaaaggcuguaucccggagggugaagaggcuauaaccaucgugcagcacucuucgcccccugggcucauuguaacgucauauagcaacuacugcgaggacaguuuuuguaaugauaaggacucccugucucaguucugggaauuuagcgagacuaccgcauccacagugucaacuacccugcacugcccaacaugugucgcccucggaaccugcuucagugcucccagcuuaccuuguccaaacggcacgacucggugcuaucagggcaaacuggaaaucacagggggagguauugagucuuccguggaaguuaagggcuguaccgccaugaucgggugccgccuuaugucaggaauauuggcggugggccccauguuuguccgagaggcaugcccucaucaacugcuaacucagccacguaagacagagaauggugccaccugucucccgauucccgugugggggcugcagcuucuguugccucuccuguuacccagcuucauccacuuuaguuga

SEQ ID NO: 2504 - RNA, 1590 nt, Artificial Sequence
  AHZ44440 variant
augcugcucgccgugcuuuacugccuguuguggagcuuccagaccuccgcuggccacuuucccagagcaugugucucuucaaagaacuuaauggagaaagaaugcuguccuccauggaguggggacaggagcccgugcggacaacuguccggucggggcucuugucagaauauccuacucucgaacgcccccuuggggccucaguucccauuuacaggaguugaugaccgcgagucauggcccagcguguucuauaaucgaacuugccaguguaguggcaacuuuauggguuucaauugcgggaacuguaaguuuggauucuggggcccuaauugcacggaacguagacuucugguaaggcggaacauuuuugauuuguccgcgccagagaaagacaaguucuuugcuuaccucacccuggccaaacauacaauaucuagcgauuaugugauccccauuggcacuuacgggcaaaugaagaauggauccaccccuauguucaacgacaucaauauuuaugaucuguuugucuggaugcacuacuaugugucaauggacgcacucuuagguggcagugaaaucuggcgcgauauagacuucgcccaugaggcuccagcauuccugccguggcacagacuuuuucugcugaggugggagcaggaaauccagaagcuaacaggggaugagaacuucaccauucccuacugggacuggcgggaugccgaaaaaugugacaucugcacugacgaguacaugggaggccagcauccuacaaauccaaaccuccugagccccgcuuccuuuuucucuucauggcaaauuguuugcagccgccuugaggaauauaauagucaccagucucuguguaacgguaccccugaggggccauugcgaagaaaccccggaaaucacgauaaguccaggacgccgcggcucccuagcucggccgacguggaauuuugccugucuuuaacucaguacgaguccggcucaauggauaaagcggcaaacuucaguuuucguaauacccuggaaggcuucgccagcccccucacagggaucgcugacgccucccagucuagcaugcauaacgcacuucacauauauaugaauggaacuaugucacaaguccaggguagugcuaacgauccaauuuuucuguugcaucacgccuucguggacuccaucuuugagcaguggcuacgcagacacaggccucugcaagagguauaccccgaagcgaaugccccaauucggcauaaccgagagagcuauaugguucccuucaucccucucuaccgcaauggcgacuuuuucaucucuucaaaggaucugggguaugauuacaguuaccuucaggacagcgauccagacuccuuccaggacuauauuaaaucuuaccuggaacaggcaucgagaauauggagcugguugcucggagcugccauggugggcgcuguccugaccgccuuacuggcaggucuagugucccuccuguguaggcacaagcggaagcaacuuccggaggaaaaacagcccuugcugauggagaaggaggauuaucauucacucuaccagagucaccuguga

SEQ ID NO: 2505 - RNA, 1590 nt, Artificial Sequence
  AGV39051 variant
augcugcucgccgugcuuuacugccuguuguggagcuuccagaccuccgcuggccacuuucccagagcaugugucucuucaaagaacuuaauggagaaagaaugcuguccuccauggaguggggacaggagcccgugcggacaacuguccggucggggcucuugucagaauauccuacucucgaacgcccccuuggggccucaguucccauuuacaggaguugaugaccgcgagucauggcccagcguguucuauaaucgaacuugccaguguaguggcaacuuuauggguuucaauugcgggaacuguaaguuuggauucuggggcccuaauugcacggaacguagacuucugguaaggcggaacauuuuugauuuguccgcgccagagaaagacaaguucuuugcuuaccucacccuggccaaacauacaauaucuagcgauuaugugauccccauuggcacuuacgggcaaaugaagaauggauccaccccuauguucaacgacaucaauauuuaugaucuguuugucuggaugcacuacuaugugucaauggacgcacucuuagguggcagugaaaucuggcgcgauauagacuucgcccaugaggcuccagcauuccugccguggcacagacuuuuucugcugaggugggagcaggaaauccagaagcuaacaggggaugagaacuucaccauucccuacugggacuggcgggaugccgaaaaaugugacaucugcacugacgaguacaugggaggccagcauccuacaaauccaaaccuccugagccccgcuuccuuuuucucuucauggcaaauuguuugcagccgccuugaggaauauaauagucaccagucucuguguaacgguaccccugaggggccauugcgaagaaaccccggaaaucacgauaaguccaggacgccgcggcucccuagcucggccgacguggaauuuugccugucuuuaacucaguacgaguccggcucaauggauaaagcggcaaacuucaguuuucguaauacccuggaaggcuucgccagcccccucacagggaucgcugacgccucccagucuagcaugcauaacgcacuucacauauauaugaauggaacuaugucacaaguccaggguagugcuaacgauccaauuuuucuguugcaucacgccuucguggacuccaucuuugagcaguggcuacgcagacacaggccucugcaagagguauaccccgaagcgaaugccccaauuggccauaaccgggagagcuauaugguucccuucaucccucucuaccgaaauggggacuuuuucaucucuucaaaggaucugggauaugauuacaguuaccuucaggacagcgauccagacuccuuccaggacuauauuaaaucuuaccuggaacaggcaucgcgcauauggagcugguugcucggcgcugccauggugggugcuguccugaccgccuuacuggcagggcuagugucccuccuguguagacacaagaggaagcaacuuccggaggaaaaacagcccuugcugauggagaaggaggauuaucauucacucuaccagagucaccuguga

SEQ ID NO: 2506 - RNA, 1590 nt, Artificial Sequence
  AGV39049 variant
augcugcucgccgugcuuuacugccuguuguggagcuuccagaccuccgcuggccacuuucccagagcaugugucucuucaaagaacuuaauggagaaagaaugcuguccuccauggaguggggacaggagcccgugcggacaacuguccggucggggcucuugucagaauauccuacucucgaacgcccccuuggggccucaguucccauuuacaggaguugaugaccgcgagucauggcccagcguguucuauaaucgaacuugccaguguaguggcaacuuuauggguuucaauugcgggaacuguaaguuuggauucuggggcccuaauugcacggaacguagacuucugguaaggcggaacauuuuugauuuguccgcgccagagaaagacaaguucuuugcuuaccucacccuggccaaacauacaauaucuagcgauuaugugauccccauuggcacuuacgggcaaaugaagaauggauccaccccuauguucaacgacaucaauauuuaugaucuguuugucuggaugcacuacuaugugucaauggacgcacucuuagguggcagugaaaucuggcgcgauauagacuucgcccaugaggcuccagcauuccugccguggcacagacuuuuucugcugaggugggagcaggaaauccagaagcuaacaggggaugagaacuucaccauucccuacugggacuggcgggaugccgaaaaaugugacaucugcacugacgaguacaugggaggccagcauccuacaaauccaaaccuccugagccccgcuuccuuuuucucuucauggcaaauuguuugcagccgccuugaggaauauaauagucaccagucucuguguaacgguaccccugaggggccauugcgaagaaaccccggaaaucacgauaaguccaggacgccgcggcucccuagcucggccgacguggaauuuugccugucuuuaacucaguacgaguccggcucaauggauaaagcggcaaacuucaguuuucguaauacccuggaaggcuucgccagcccccucacagggaucgcugacgccucccagucuagcaugcauaacgcacuucacauauauaugaauggaacuaugucacaaguccaggguagugcuaacgauccaauuuuucuguugcaucacgccuucguggacuccaucuuugagcaguggcuacaacgccacagaccucugcaggagguauaccccgaagcgaaugccccaauuggccauaacagggagagcuauaugguucccuucaucccucucuaccggaauggggacuuuuucaucucuucaaaggaucugggauaugauuacaguuaccuucaggacagcgauccagacuccuuccaggacuauauuaaaucuuaccuggaacaagcaucgcgaauauggagcugguugcucggcgcugccauggugggugcuguccugaccgccuuacuggcagggcuagugucccuccugugucgccacaagagaaagcagcuuccggaggaaaaacagcccuugcugauggagaaggaggauuaucauucacucuaccagagucaccuguga

SEQ ID NO: 2507 - RNA, 1590 nt, Artificial Sequence
  AGV39050 variant
augcugcucgccgugcuuuacugccuguuguggagcuuccagaccuccgcuggccacuuucccagagcaugugucucuucaaagaacuuaauggagaaagaaugcuguccuccauggaguggggacaggagcccgugcggacaacuguccggucggggcucuugucagaauauccuacucucgaacgcccccuuggggccucaguucccauuuacaggaguugaugaccgcgagucauggcccagcguguucuauaaucgaacuugccaguguaguggcaacuuuauggguuucaauugcgggaacuguaaguuuggauucuggggcccuaauugcacggaacguagacuucugguaaggcggaacauuuuugauuuguccgcgccagagaaagacaaguucuuugcuuaccucacccuggccaaacauacaauaucuagcgauuaugugauccccauuggcacuuacgggcaaaugaagaauggauccaccccuauguucaacgacaucaauauuuaugaucuguuugucuggaugcacuacuaugugucaauggacgcacucuuagguggcuacgaaaucuggcgcgauauagacuucgcccaugaggcuccagcauuccugccguggcacagacuuuuucugcugaggugggagcaggaaauccagaagcuaacaggggaugagaacuucaccauucccuacugggacuggcgggaugccgaaaaaugugacaucugcacugacgaguauaugggaggccagcauccuacaaauccaaaccuccugagucccgcuagcuuuuucucuuccuggcaaauuguuugcucacgccuugaggaauacaauagccaccagagucuguguaacgguaccccugaggggccauugcgaagaaaccccggaaaucacgauaagucuaggacgccgcggcucccuuccagcgccgacguggaauuuugccugucguuaacucaguaugagucuggcuccauggauaaagcggcaaacuucucauuucguaauacccuggaaggcuucgccaguccccucacagggaucgcugacgccagccaguccucuaugcauaacgcacuucacauauacaugaauggaacuaugagccaaguccaggguucagcuaacgauccaauuuuucuguugcaucacgccuucguggacaguaucuuugagcaguggcuacgcagacacaggccucugcaagagguauaucccgaagcgaaugccccaauuggccauaaccgggaguccuacaugguucccuucaucccucucuaucgaaauggggacuuuuucaucagcucuaaggaucugggauacgauuacucauaucuucaggacagugauccagacagcuuccaggacuacauuaaauccuaucuggaacaggcaucucgcauauggucgugguugcucggcgcugccauggugggugcuguccugaccgccuuacuggcagggcuagugagccuccuguguagacacaagaggaagcaacuuccggaggaaaaacagcccuugcugauggagaaggaggauuaccauucccucuaucagucacaccuguga

SEQ ID NO: 2508 - RNA, 714 nt, Artificial Sequence
  CAA04137 variant
augagcccccugugguggggcuuccuccuuuccugccugggguguaagaucuugccuggagcccagggucaauuuccaagagugugcaugaccgucgacucuuuaguuaacaaagaguguugcccgaggcugggcgcugaaucagcaaaugugugugggagucagcagggacggggccagugcacagagguacgcgccgauacucgacccuggagcgguccuuacauucuacguaaccaagacgauagagaacucuggccaaggaaguucuuucaccggacguguaaaugcaccgggaauuucgcgggauauaacuguggcgacugcaaguuuggcuggacagggcccaauugugagcgcaaaaagccuccagugauaagacagaacauccauucccugucuccccaggaaagggagcaguuccuuggagcucuggauuuggccaagaaacggguccacccugacuacgugauuacuacccaacauuggguuggucuccugggcccaaaugggacacagccgcaguuugcaaacugcucgguguaugauuucuuugucuggcugcacuacuauucagugcgcgacacccucuuaggaggcuucuuucccuggcugaagguauacuauuaccgauucguuaucggucuuagaguguggcagugggaggucauuagcugcaaauugaucaagagggccacuacacggcaaccuuga

SEQ ID NO: 2509 - RNA, 1590 nt, Artificial Sequence; identical to SEQ ID NO: 2505
  AAA61242 variant

SEQ ID NO: 2510 - RNA, 1590 nt, Artificial Sequence
  AGV39054 variant
augcugcucgccgugcuuuacugccuguuguggagcuuccagaccuccgcuggccacuuucccagagcaugugucucuucaaagaacuuaauggagaaagaaugcuguccuccauggaguggggacaggagcccgugcggacaacuguccggucggggcucuugucagaauauccuacucucgaacgcccccuuggggccucaguucccauuuacaggaguugaugaccgcgagucauggcccagcguguucuauaaucgaacuugccaguguaguggcaacuuuauggguuucaauugcgggaacuguaaguuuggauucuggggcccuaauugcacggaacguagacuucugguaaggcggaacauuuuugauuuguccgcgccagagaaagacaaguucuuugcuuaccucacccuggccaaacauacaauaucuagcgauuaugugauccccauuggcacuuacgggcaaaugaagaauggauccaccccuauguucaacgacaucaauauuuaugaucuguuugucuggaugcacuacuaugugucaauggacgcacucuuagguggcagugaaaucuggcgcgauauagacuucgcccaugaggcuccagcauuccugccguggcacagacuuuuucugcugaggugggagcaggaaauccagaagcuaacaggggaugagaacuucaccauucccuacugggacuggcgggaugccgaaaaaugugacaucugcacugacgaguacguuggaggccagcauccuacaaauccaaaccuccugagccccgcuuccuuuuucucuucauggcaaauugugugcagccgccuugaggaauauaauagucaccagucucuguguaacgguaccccugaggggccauugcgaagaaaccccggaaaucacgauaaguccaggacgccgcggcucccuagcucggccgacgucgaauuuugccugucuuuaacucaguacgaguccggcucaauggauaaagcggcaaacuucaguuuucguaauacccuggaaggcuucgccagcccccucacagggaucgcugacgccucccagucuagcaugcauaacgcacuucacauauauaugaauggaacuaugucacaagugcaggguagugcuaacgauccaauuuuucuguugcaucacgccuucguagacuccaucuuugagcaguggcuacgcagacacaggccucugcaagagguuuaccccgaagcgaaugccccaauuggccauaaccgggagagcuauauggugcccuucaucccucucuaccgaaauggggacuuuuucaucucuucaaaggaucugggauaugauuacaguuaccuucaggacagcgauccagacuccuuccaggacuauauuaaaucuuaccuggaacaggcaucgcgcauauggagcugguugcucggcgcugccauggucggugcugugcugaccgccuuacuggcagggcuagugucccuccuguguagacacaagaggaagcaacuuccggaggaaaaacagcccuugcugauggagaaggaggauuaucauucacucuaccagagucaccuguga

SEQ ID NO: 2511 - RNA, 1590 nt, Artificial Sequence
  AGV39162 variant
augcugcucgccgugcuuuacugccuguuguggagcuuccagaccuccgcuggccacuuucccagagcaugugucucuucaaagaacuuaauggagaaagaaugcuguccuccauggaguggggacaggagcccgugcggacaacuguccggucggggcucuugucagaauauccuacucucgaacgcccccuuggggccucaguucccauuuacaggaguugaugaccgcgagucauggcccagcguguucuauaaucgaacuugccaguguaguggcaacuuuauggguuucaauugcgggaacuguaaguuuggauucuggggcccuaauugcacggaacguagacuucugguaaggcggaacauuuuugauuuguccgcgccagagaaagacaaguucuuugcuuaccucacccuggccaaacauacaauaucuagcgauuaugugauccccauuggcacuuacgggcaaaugaagaauggauccaccccuauguucaacgacaucaauauuuaugaucuguuugucuggaugcacuacuaugugucaauggacgcacucuuagguggcagugaaaucuggcgcgauauagacuucgcccaugaggcuccagcauuccugccguggcacagacuuuuucugcugaggugggagcaggaaauccagaagcuaacaggggaugagaacuucaccauucccuacugggacuggcgggaugccgaaaaaugugacaucugcacugacgaguacaugggaggccagcauccuacaaauccaaaccuccugagccccgcuuccuuuuucucuucauggcaaauuguuugcagccgccuugaggaauauaauagucaccagucucuguguaacgguaccccugaggggccauugcgaagaaaccccggaaaucacgauaaguccaggacgccgcggcucccuagcucggccgacguggaauuuugccugucuuuaacucaguacgaguccggcucaauggauaaagcggcaaacuucaguuuucguaauacccuggaaggcuucgccagcccccucacagggaucgcugacgccucccagucuagcaugcauaacgcacuucacauauauaugaauggaacuaugucacaaguccaggguagugcuaacgauccaauuuuucuguugcaucacgccuucguggacuccaucuuugagcaguggcuacgcagacacaggcugcuccaagagguauacccugaagcgaaugcccccauuggccauaaccgggagagcuauaugguuccauucaucccccuguaccgaaauggggacuuuuucaucucuucaaaggaucuuggauaugauuacaguuaccugcaggacagcgauccugacuccuuccaggacuauauuaaaucuuacuuggaacaggcaucgcgcauauggagcuggcuccugggcgcugccauggugggugcugucuuaaccgcccugcuagcagggcucgugucccugcuuuguagacacaagaggaagcaauugccagaggaaaaacagccgcugcucauggagaaggaggauuaucauucacuguaccagagucaccuuuga

SEQ ID NO: 2512 - RNA, 1590 nt, Artificial Sequence
  AGV39086 variant
augcugcucgccgugcuuuacugccuguuguggagcuuccagaccuccgcuggccacuuucccagagcaugugucucuucaaagaacuuaauggagaaagaaugcuguccuccauggaguggggacaggagcccgugcggacaacuguccggucggggcucuugucagaauauccuacucucgaacgcccccuuggggccucaguucccauuuacaggaguugaugaccgcgagucauggcccagcguguucuauaaucgaacuugccaguguaguggcaacuuuauggguuucaauugcgggaacuguaaguuuggauucuggggcccuaauugcacggaacguagacuucugguaaggcggaacauuuuugauuuguccgcgccagagaaagacaaguucuuugcuuaccucacccuggccaaacauacaauaucuagcgauuaugugauccccauuggcacuuacgggcaaaugaagaauggauccaccccuauguucaacgacaucaauauuuaugaucuguuugucuggaugcacuacuaugugucaauggacgcacucuuagguggcagugaaaucuggcgcgauauagacuucgcccaugaggcuccagcauuccugccguggcacagacuuuuucugcugaggugggagcaggaaauccagaagcuaacaggggaugagaacuucaccauucccuacugggacuggcgggaugccgaaaaaugugacaucugcacugacgaguacaugggaggccagcauccuacaaauccaaaccuccugagccccgcuuccuuuuucucuucauggcaaauuguuugcagccgccuugaggaauauaauagucaccagucucuguguaacgguaccccugaggggccauugcgaagaaaccccggaaaucacgauaaguccaggacgccgcggcucccuagcucggccgacguggaauuuugccugucuuuaacucaguacgaguccggcucaauggauaaagcggcaaacuucaguuuucguaauacccuggaaggcuucgccagcccccucacagggaucgcugacgccucccagucuagcaugcauaacgcacuucacauauauaugaauggaacuaugucacaaguccaggguagugcuaacgauccaauuuuucuguugcaucacgccuucguggacuccauguuugagcaguggcuacgcagacacaggccucugcaagagguauaccccgaagcgaaugccccaaucggccauaaccgggagagcuauaugguucccuucauuccucucuaccgaaauggggacuuuuucaucucuucaaaggaucugggauaugauuacaguuaccuucaggacagcgauccagacuccuuccaggacuauaucaaaucuuaccuggaacaggcaucgcgcauuuggagcugguugcucggcgcugccauggugggugcuguccugaccgccuuacuggcagggcuagugucccuccuguguagacacaagaggaagcaacuuccggaggaaaaacagcccuugcugauggagaaggaggauuaucauucacucuaccagagucaccuguga

SEQ ID NO: 2513 - RNA, 1614 nt, Artificial Sequence
  AAC15468 variant
augagcgcccccaagcugcucucccuuggcugcaucuucuuuccucuguuguuauuccagcaagcuagagcacaguuuccaaggcagugugccaccguggaggcgcugcggucugggaugugcuguccggaccuaucacccgucaguggaccugguacagaucgcugcggcagcuccucugggcgaggacguugugaagcuguuacugccgacucgagaccacacucaccccaguacccucaugauggcagggacgaucgggagguguggccacuccgcuucuuuaacagaacgugccacuguaaugguaacuucagcgggcauaauugcggaaccuguaggcccggcuggcggggcgcagccugcgaccaacgcguacugauugugcgaagaaaccuucuggauuugaguaaagaagagaagaaucacuuugucagggcucucgacauggcaaaacggacaacucauccucuguucgugauagccacccgucgcuccgaagagauccuggggccagauggaaacacaccgcaguuugagaauauuucuaucuauaacuacuucguuuggacccacuauuacagcgugaagaaaacuuuucucggugucggccaggaauccuucggggagguggacuuuucacacgaaggacccgcuuucuuaacauggcauagauaucaucugcuuagguuggagaaggauaugcaggagaugcugcaagaaccuaguuucagccuaccauacuggaauuuugccaccggcaagaacguaugugacauuugcacggaugaccucauggguucucgguccaauuucgacucaacucugaucagccccaacaguguguuuucucaguggcgaguugucugcgauucccuugaggacuaugauacccuggggacauuguguaauagcacugaagacggaccuauacgcagaaacccagcgggcaauguggcaaggcccauggugcagcggcucccggagccucaggaugucgcccaaugccuggaaguuggcuuauucgacacacccccauuuuacucgaacucuaccaacuccuuccgcaauaccguggagggguacucagauccuacgggaaaauaugaccccgcuguaagaagucugcacaaccucgcccaccuuuuucugaaugguacuggcgggcagacacacuugagcccaaacgaucccaucuucgugcuacugcauaccuuuacugacgcagucuucgaugaguggcucaggcguuacaaugcugacauuuccacauuuccucuggaaaacgccccaaucggacacaaucggcaguauaacauggugccguucuggcccccuguuaccaauacggagauguuugugaccgcgccagacaaccuuggcuacacauaugaaauucaauggcccucucgagaguucagcgucccugaaaucauagccauugcagugguaggugcucuguugcucguugcccugaucuucgggacugcuucauacuuaauuagagccaggcgcaguauggaugaggcaaaucagccacugcuaaccgaccaguaucaguguuacgccgaggaauacgagaagcuccaaaaccccaaucaguccguggucuga

SEQ ID NO: 2514 - RNA, 1560 nt, Artificial Sequence
  AAA20870 variant
augagcccccugugguggggcuuccuccuuuccugccugggguguaagaucuugccuggagcccagggucaauuuccaagagugugcaugaccgucgacucuuuaguuaacaaagaguguugcccgaggcugggcgcugaaucagcaaaugugugugggagucagcagggacggggccagugcacagagguacgcgccgauacucgacccuggagcgguccuuacauucuacguaaccaagacgauagagaacucuggccaaggaaguucuuucaccggacguguaaaugcaccgggaauuucgcgggauauaacuguggcgacugcaaguuuggcuggacagggcccaauugugagcgcaaaaagccuccagugauaagacagaacauccauucccugucuccccaggaaagggagcaguuccuuggagcucuggauuuggccaagaaacggguccacccugacuacgugauuacuacccaacauuggcucggucugcugggcccaaaugggacacagccgcaguuugcaaacugcucgguuuaugauuucuuuguguggcuccacuacuauucaguccgcgacaccuuacugggacccggccgaccuuacagagccaucgauuucagccaucaggguccagcuuuugugacuuggcacagguaucaccuuuugugccuggagcgggaccuacaacgucucauugggaaugaaaguuucgcacugcccuacuggaacuuugccacaggacgcaaugagugugauguaugcaccgaccagcuuuucggcgcugccagaccugaugacccaacgcugaucuccaggaacucucgguucagcuccugggaaacuguuugugacucauuggaugacuacaaucaucucgugacccugugcaacggcacauaugagggguuacugcgacgcaaucagaugggaagaaacaguaugaagcuccccacucuuaaagauauaagggacugucugagcuugcaaaaguuugauaacccgccuuucuuucaaaauucuaccuucuccuuucggaacgcgcuagaggguuucgacaaagcagauggcacacuggacucacaggucaugagccuccacaaucuggugcauaguuuucuuaacgggaccaaugcccugccccacucugcugccaacgauccaaucuucguggucuugcacuccuuuacggacgcaauuuucgaugaauggaugaagcgcuuuaauccucccgcugacgccuggccacaggagcucgcgcccaucggacauaacagaauguacaauaugguuccuuucuuuccaccggugacuaacgaggaacuguucuuaacaagcgaccagcugggcuauucguacgccauugaucuacccguaucuguggaagagaccccugguuggccaacuacacuccuggucgugauggggacccuuguugcauuggugggccuguucguccuccuggcuuuucuucaguauaggcgucugcggaagggauacacgcccuugauggagacccaccucuccucaaaacgauauacagaagaggccuga

SEQ ID NO: 2515 - RNA, 456 nt, Artificial Sequence
  CCDS7679.1 variant
augagaaggcugcuccuugugaccagccuggucguuguguuguuaugggaggccggcgcuguacccgcaccuaaagugccaaucaaaaugcaggucaagcacuggccguccgaacaagaccccgagaaagccuggggagcgcgggugguugaaccuccagagaaggaugaccagcuggugguccuauuccccgugcagaaaccuaagcuccugacaacugaagagaagccacgcgggcagggucgaggccccauucuuccugggacgaaggcuuggauggagaccgaagauacacugggacauguauugucuccagagccggaccacgauucacucuaccaucccccuccagaagaggaccaaggcgaggaacgucccagacuguggguuaugccuaaccaccaggugcugcucgguccagaggaagaucaggaccauauauaucacccccaguga

SEQ ID NO: 2516 - RNA, 525 nt, Artificial Sequence
  ACF47598 variant
auggugagcuacugggacaccggcguccugcucugcgcccuucuguccuguuuguuacugacagggucuucaaguggaagcaagcuaaaagaucccgagcucucccugaaggguacucagcacaucaugcaagcuggccagacgcuucaucugcagugcagaggggaagcagcccacaaauggucuuugccugagaugguuucgaaggaaucagagaggcucagcauuaccaaaagugcguguggacggaacggcaagcaguucugcuccacacugacucugaauaccgcucaagccaaccauacagguuuuuauucuuguaaguaccucgcagugccaaccagcaaaaagaaagaaacugaguccgccauauauaucuucauuucagacacagggcgcccguuuguagagauguacagugaaauccccgagauuauccacaugaccgaaggacgagaguuagugauaccuugccgugucacgagcccaaauaucacugugacccugaagaaaaagaaggcuuga

SEQ ID NO: 2517 - RNA, 750 nt, Artificial Sequence
  BAR92607 variant
augggcagcgacgugagagaucugaacgcccuccuucccgcugucccuucccugggaggggguggcgggugcgcauugccaguuucuggagccgcgcagugggcuccgguguuagacuucgcacccccuggcgccucagccuacgguagucuagggggaccagcucccccuccagcacccccuccaccgcccccuccacccccucacagcuuuaucaagcaagagccauccuggggcggcgccgaaccccaugaggaacagugucugucugcuuucaccguacacuuuucggggcaguucacaggaacugccggugcgugcagguauggcccguuugggccucccccaccuucacaggcaagcaguggacaagcccggauguuccccaaugcuccauaccuccccuccugucuggagucucagccugccauucgcaaccagggcuauagcacggugaccuuugaugguacaccauccuacgggcauacuccgucacaccaugcagcucaguuccccaaucacaguuuuaaacacgaagacccuaugggacaacagggcagccuuggcgagcagcaguauucugucccacccccuguguacgggugccauaccccaacagauuccuguaccggaucacaagcccuguugcuccgaacucccuauagcagugacaaccuguaccagaugacaucucagcuggagugcaugaccuggaaucaaaugaaccucggugcgacguuaaagggcuga

SEQ ID NO: 2518 - RNA, 1350 nt, Artificial Sequence
  AAA61299 variant
augggcagcgacgugagagaucugaacgcccuccuucccgcugucccuucccugggaggggguggcgggugcgcauugccaguuucuggagccgcgcagugggcuccgguguuagacuucgcacccccuggcgccucagccuacgguagucuagggggaccagcucccccuccagcacccccuccaccgcccccuccacccccucacagcuuuaucaagcaagagccauccuggggcggcgccgaaccccaugaggaacagugucugucugcuuucaccguacacuuuucggggcaguucacaggaacugccggugcgugcagguauggcccguuugggccucccccaccuucacaggcaagcaguggacaagcccggauguuccccaaugcuccauaccuccccuccugucuggagucucagccugccauucgcaaccagggcuauagcacggugaccuuugaugguacaccauccuacgggcauacuccgucacaccaugcagcucaguuccccaaucacaguuuuaaacacgaagacccuaugggacaacagggcagccuuggcgagcagcaguauucugucccacccccuguguacgggugccauaccccaacagauuccuguaccggaucacaagcccuguugcuccgaacucccuauagcagugacaaccuguaccagaugacaucucagcuggagugcaugaccuggaaucaaaugaaccucggugcgacguuaaagggcguugccgcaggguccagcucgucugugaaauggacugaaggacaguccaaucacucaaccggcuacgagagugauaaccauacaacuccgauacuguguggugcucaguaucguauccacacccacggggucuucagaggcauucaggacgugaggcggguaccuggaguugccccaacacuugugcgcagcgcuuccgaaaccucugagaagagacccuuuaugugcgccuacccuggcuguaauaaaagguauuucaaguugagccaucugcaaaugcacucacggaagcauacgggggagaaacccuaccagugcgauuuuaaggacugugaacgccgauucaguagauccgaucagcuaaaaaggcaccagcggcgucauacuggagucaagccauuccaaugcaaaacaugccagcgcaaguuuagcagaucugaccaccucaagacccacacuaggacacauaccgguaaaacgucagagaagccuuucaguugucgguggcccagcugccagaaaaaguuugcacgauccgaugaacuggugcgccaccauaacaugcaccagagaaauaugaccaaacuucaacuggccuuguga

SEQ ID NO: 2519 - RNA, 279 nt, Artificial Sequence
  AAA63269 variant
augcagagaaggggccaaccccuggagaaccacguggcccucauccauuggcagagcgcugggauuccugcauccaagguccacaauuacugcaacaugaaaaagucucggcuuggacgcucacgagccguucguauaagucagccacuguugagcccgagaaggugucccuuacaucugaccgaacggggugcgggccuacuccagccucaaccacaggggcccgugcgcacaccuggaccacccuccggcucucacccugcugccgcagacaauuga

SEQ ID NO: 2520 - RNA, 246 nt, Artificial Sequence
  AAP35763 variant
auggagagccccaagaaaaagaaccagcaacugaaagugggcauccuccaccuuggguccagacagaagaaaauuaggauacagcugcggucucagugcgccaccuggaaggucaucuguaagucaugcauuagucaaacaccuggaaucaauuuggacuuagguagcggcguuaaagugaagauuaucccaaaagaggaacauuguaagaugccggaagcuggggaggaacagccccagguauga

SEQ ID NO: 2521 - RNA, 1098 nt, Artificial Sequence
  AAA59652 variant
auggccgugauggcccccagaacccugcugcugcugcugagcggcgcccuggcccugacccagaccugggccggcagccacagcaugagauacuucuucaccagcgugagcagacccggcagaggcgagcccagauucaucgccgugggcuacguggacgacacccaguucgugagauucgacagcgacgccgccagccagaagauggagcccagagcccccuggaucgagcaggagggccccgaguacugggaccaggagaccagaaacaugaaggcccacagccagaccgacagagccaaccugggcacccugagaggcuacuacaaccagagcgaggacggcagccacaccauccagaucauguacggcugcgacgugggccccgacggcagauuccugagaggcuacagacaggacgccuacgacggcaaggacuacaucgcccugaacgaggaccugagaagcuggaccgccgccgacauggccgcccagaucaccaagagaaagugggaggccgugcacgccgccgagcagagaagaguguaccuggagggcagaugcguggacggccugagaagauaccuggagaacggcaaggagacccugcagagaaccgacccccccaagacccacaugacccaccaccccaucagcgaccacgaggccacccugagaugcugggcccugggcuucuaccccgccgagaucacccugaccuggcagagagacggcgaggaccagacccaggacaccgagcugguggagaccagacccgccggcgacggcaccuuccagaagugggccgccgugguggugcccagcggcgaggagcagagauacaccugccacgugcagcacgagggccugcccaagccccugacccugagaugggagcugagcagccagcccaccauccccaucgugggcaucaucgccggccuggugcugcugggcgccgugaucaccggcgccgugguggccgccgugauguggagaagaaagagcagcgacagaaagggcggcagcuacacccaggccgccagcagcgacagcgcccagggcagcgacgugagccugaccgccugcaagguguga

SEQ ID NO: 2522 - RNA, 1098 nt, Artificial Sequence
  AAA59606 variant
auggccgugauggcccccagaacccuggugcugcugcugagcggcgcccuggcccugacccagaccugggccggcagccacagcaugagauacuucuucaccagcgugagcagacccggcagaggcgagcccagauucaucgccgugggcuacguggacgacacccaguucgugagauucgacagcgacgccgccagccagagaauggagcccagagcccccuggaucgagcaggagggccccgaguacugggacggcgagaccagaaaggugaaggcccacagccagacccacagaguggaccugggcacccugagaggcuacuacaaccagagcgaggccggcagccacaccgugcagagaauguacggcugcgacgugggcagcgacuggagauuccugagaggcuaccaccaguacgccuacgacggcaaggacuacaucgcccugaaggaggaccugagaagcuggaccgccgccgacauggccgcccagaccaccaagcacaagugggaggccgcccacguggccgagcagcugagagccuaccuggagggcaccugcguggaguggcugagaagauaccuggagaacggcaaggagacccugcagagaaccgacgcccccaagacccacaugacccaccacgccgugagcgaccacgaggccacccugagaugcugggcccugagcuucuaccccgccgagaucacccugaccuggcagagagacggcgaggaccagacccaggacaccgagcugguggagaccagacccgccggcgacggcaccuuccagaagugggccgccgugguggugcccagcggccaggagcagagauacaccugccacgugcagcacgagggccugcccaagccccugacccugagaugggagcccagcagccagcccaccauccccaucgugggcaucaucgccggccuggugcuguucggcgccgugaucaccggcgccgugguggccgccgugauguggagaagaaagagcagcgacagaaagggcggcagcuacagccaggccgccagcagcgacagcgcccagggcagcgacgugagccugaccgccugcaagguguga

SEQ ID NO: 2523 - RNA, 1263 nt, Artificial Sequence
  AAH37161 variant
augcccggcggcugcagcagaggccccgccgccggcgacggcagacugagacuggccagacuggcccuggugcugcugggcugggugagcagcagcagccccaccagcagcgccagcagcuucagcagcagcgcccccuuccuggccagcgccgugagcgcccagcccccccugcccgaccagugccccgcccugugcgagugcagcgaggccgccagaaccgugaagugcgugaacagaaaccugaccgaggugcccaccgaccugcccgccuacgugagaaaccuguuccugaccggcaaccagcuggccgugcugcccgccggcgccuucgccagaagacccccccuggccgagcuggccgcccugaaccugagcggcagcagacuggacgaggugagagccggcgccuucgagcaccugcccagccugagacagcuggaccugagccacaacccccuggccgaccugagccccuucgccuucagcggcagcaacgccagcgugagcgcccccagcccccugguggagcugauccugaaccacaucgugccccccgaggacgagagacagaacagaagcuucgagggcauggugguggccgcccugcuggccggcagagcccugcagggccugagaagacuggagcuggccagcaaccacuuccuguaccugcccagagacgugcuggcccagcugcccagccugagacaccuggaccugagcaacaacagccuggugagccugaccuacgugagcuucagaaaccugacccaccuggagagccugcaccuggaggacaacgcccugaaggugcugcacaacggcacccuggccgagcugcagggccugccccacaucagaguguuccuggacaacaaccccugggugugcgacugccacauggccgacauggugaccuggcugaaggagaccgagguggugcagggcaaggacagacugaccugcgccuaccccgagaagaugagaaacagagugcugcuggagcugaacagcgccgaccuggacugcgaccccauccugccccccagccugcagaccagcuacguguuccugggcaucgugcuggcccugaucggcgccaucuuccugcuggugcuguaccugaacagaaagggcaucaagaaguggaugcacaacaucagagacgccugcagagaccacauggagggcuaccacuacagauacgagaucaacgccgaccccagacugaccaaccugagcagcaacagcgacguguga

SEQ ID NO: 2524 - RNA, 1632 nt, Artificial Sequence
  AAH33010 variant
augagaaagcccgccgccggcuuccugcccagccugcugaaggugcugcugcugccccuggcccccgccgccgcccaggacagcacccaggccagcacccccggcagcccccugagccccaccgaguacgagagauucuucgcccugcugacccccaccuggaaggccgagaccaccugcagacugagagccacccacggcugcagaaaccccacccuggugcagcuggaccaguacgagaaccacggccuggugcccgacggcgccgugugcagcaaccugcccuacgccagcugguucgagagcuucugccaguucacccacuacagaugcagcaaccacguguacuacgccaagagagugcugugcagccagcccgugagcauccugagccccaacacccugaaggagaucgaggccagcgccgaggugagccccaccaccaugaccagccccaucagcccccacuucaccgugaccgagagacagaccuuccagcccuggcccgagagacugagcaacaacguggaggagcugcugcagagcagccugagccugggcggccaggagcaggcccccgagcacaagcaggagcagggcguggagcacagacaggagcccacccaggagcacaagcaggaggagggccagaagcaggaggagcaggaggaggagcaggaggaggagggcaagcaggaggagggccagggcaccaaggagggcagagaggccgugagccagcugcagaccgacagcgagcccaaguuccacagcgagagccugagcagcaaccccagcagcuucgcccccagagugagagagguggagagcacccccaugaucauggagaacauccaggagcugaucagaagcgcccaggagaucgacgagaugaacgagaucuacgacgagaacagcuacuggagaaaccagaaccccggcagccugcugcagcugccccacaccgaggcccugcuggugcugugcuacagcaucguggagaacaccugcaucaucacccccaccgccaaggccuggaaguacauggaggaggagauccugggcuucggcaagagcgugugcgacagccugggcagaagacacaugagcaccugcgcccugugcgacuucugcagccugaagcuggagcagugccacagcgaggccagccugcagagacagcagugcgacaccagccacaagacccccuucgugagcccccugcuggccagccagagccugagcaucggcaaccaggugggcagccccgagagcggcagauucuacggccuggaccuguacggcggccugcacauggacuucuggugcgccagacuggccaccaagggcugcgaggacgugagagugagcggcuggcugcagaccgaguuccugagcuuccaggacggcgacuuccccaccaagaucugcgacaccgacuacauccaguaccccaacuacugcagcuucaagagccagcagugccugaugagaaacagaaacagaaaggugagcagaaugagaugccugcagaacgagaccuacagcgcccugagccccggcaagagcgaggacguggugcugagauggagccaggaguucagcacccugacccugggccaguucggcuga

SEQ ID NO: 2525 - RNA, 1830 nt, Artificial Sequence
  AAB58754 variant
augaaguggguggagagcaucuuccugaucuuccugcugaacuucaccgagagcagaacccugcacagaaacgaguacggcaucgccagcauccuggacagcuaccagugcaccgccgagaucagccuggccgaccuggccaccaucuucuucgcccaguucgugcaggaggccaccuacaaggaggugagcaagauggugaaggacgcccugaccgccaucgagaagcccaccggcgacgagcagagcagcggcugccuggagaaccagcugcccgccuuccuggaggagcugugccacgagaaggagauccuggagaaguacggccacagcgacugcugcagccagagcgaggagggcagacacaacugcuuccuggcccacaagaagcccacccccgccagcaucccccuguuccaggugcccgagcccgugaccagcugcgaggccuacgaggaggacagagagaccuucaugaacaaguucaucuacgagaucgccagaagacaccccuuccuguacgcccccaccauccugcugugggccgccagauacgacaagaucauccccagcugcugcaaggccgagaacgccguggagugcuuccagaccaaggccgccaccgugaccaaggagcugagagagagcagccugcugaaccagcacgccugcgccgugaugaagaacuucggcaccagaaccuuccaggccaucaccgugaccaagcugagccagaaguucaccaaggugaacuucaccgagauccagaagcuggugcuggacguggcccacgugcacgagcacugcugcagaggcgacgugcuggacugccugcaggacggcgagaagaucaugagcuacaucugcagccagcaggacacccugagcaacaagaucaccgagugcugcaagcugaccacccuggagagaggccagugcaucauccacgccgagaacgacgagaagcccgagggccugagccccaaccugaacagauuccugggcgacagagacuucaaccaguucagcagcggcgagaagaacaucuuccuggccagcuucgugcacgaguacagcagaagacacccccagcuggccgugagcgugauccugagaguggccaagggcuaccaggagcugcuggagaagugcuuccagaccgagaacccccuggagugccaggacaagggcgaggaggagcugcagaaguacauccaggagagccaggcccuggccaagagaagcugcggccuguuccagaagcugggcgaguacuaccugcagaacgccuuccugguggccuacaccaagaaggccccccagcugaccagcagcgagcugauggccaucaccagaaagauggccgccaccgccgccaccugcugccagcugagcgaggacaagcugcuggccugcggcgagggcgccgccgacaucaucaucggccaccugugcaucagacacgagaugacccccgugaaccccggcgugggccagugcugcaccagcagcuacgccaacagaagacccugcuucagcagccuggugguggacgagaccuacgugccccccgccuucagcgacgacaaguucaucuuccacaaggaccugugccaggcccagggcguggcccugcagaccaugaagcaggaguuccugaucaaccuggugaagcagaagccccagaucaccgaggagcagcuggaggccgugaucgccgacuucagcggccugcuggagaagugcugccagggccaggagcaggaggugugcuucgccgaggagggccagaagcugaucagcaagaccagagccgcccugggcguguga

SEQ ID NO: 2526 - RNA, 2565 nt, Artificial Sequence
  AAI26251 variant
augauggccuacagcgacaccaccaugaugagcgacgacaucgacuggcugagaagccacagaggcgugugcaagguggaccuguacaaccccgagggccagcaggaccaggacagaaaggugaucugcuucguggacgugagcacccugaacguggaggacaaggacuacaaggacgccgccagcagcagcagcgagggcaaccugaaccugggcagccuggaggagaaggagaucaucgugaucaaggacaccgagaagaaggaccagagcaagaccgagggcagcgugugccuguucaagcaggcccccagcgaccccgugagcgugcugaacuggcugcugagcgaccugcagaaguacgcccugggcuuccagcacgcccugagccccagcaccagcaccugcaagcacaaggugggcgacaccgagggcgaguaccacagagccagcagcgagaacugcuacagcguguacgccgaccaggugaacaucgacuaccugaugaacagaccccagaaccugagacuggagaugaccgccgccaagaacaccaacaacaaccagagccccagcgccccccccgccaagccccccagcacccagagagccgugaucagccccgacggcgagugcagcaucgacgaccugagcuucuacgugaacagacugagcagccuggugauccagauggcccacaaggagaucaaggagaagcuggagggcaagagcaagugccugcaccacagcaucugccccagccccggcaacaaggagagaaucagccccagaacccccgccagcaagaucgccagcgagauggccuacgaggccguggagcugaccgccgccgagaugagaggcaccggcgaggagagcagagagggcggccagaagagcuuccuguacagcgagcugagcaacaagagcaagagcggcgacaagcagaugagccagagagagagcaaggaguucgccgacagcaucagcaagggccugaugguguacgccaaccagguggccagcgacaugauggugagccugaugaagacccugaaggugcacagcagcggcaagcccauccccgccagcguggugcugaagagagugcugcugagacacaccaaggagaucgugagcgaccugaucgacagcugcaugaagaaccugcacaacaucaccggcgugcugaugaccgacagcgacuucgugagcgccgugaagagaaaccuguucaaccaguggaagcagaacgccaccgacaucauggaggccaugcugaagagacuggugagcgcccugaucggcgaggagaaggagaccaagagccagagccugagcuacgccagccugaaggccggcagccacgaccccaagugcagaaaccagagccuggaguucagcaccaugaaggccgagaugaaggagagagacaagggcaagaugaagagcgaccccugcaagagccugaccagcgccgagaaggugggcgagcacauccugaaggagggccugaccaucuggaaccagaagcagggcaacagcugcaagguggccaccaaggccugcagcaacaaggacgagaagggcgagaagaucaacgccagcaccgacagccuggccaaggaccugaucgugagcgcccugaagcugauccaguaccaccugacccagcagaccaagggcaaggacaccugcgaggaggacugccccggcagcaccaugggcuacauggcccagagcacccaguacgagaagugcggcggcggccagagcgccaaggcccugagcgugaagcagcuggagagccacagagcccccggccccagcaccugccagaaggagaaccagcaccuggacagccagaagauggacaugagcaacaucgugcugaugcugauccagaagcugcugaacgagaaccccuucaagugcgaggaccccugcgagggcgagaacaagugcagcgagcccagagccagcaaggccgccagcaugagcaacagaagcgacaaggccgaggagcagugccaggagcaccaggagcuggacugcaccagcggcaugaagcaggccaacggccaguucaucgacaagcugguggagagcgugaugaagcugugccugaucauggccaaguacagcaacgacggcgccgcccuggccgagcuggaggagcaggccgccagcgccaacaagcccaacuucagaggcaccagaugcauccacagcggcgccaugccccagaacuaccaggacagccugggccacgaggugaucgugaacaaccagugcagcaccaacagccugcagaagcagcugcaggccgugcugcaguggaucgccgccagccaguucaacgugcccaugcuguacuucaugggcgacaaggacggccagcuggagaagcugccccaggugagcgccaaggccgccgagaagggcuacagcgugggcggccugcugcaggaggugaugaaguucgccaaggagagacagcccgacgaggccgugggcaagguggccagaaagcagcugcuggacuggcugcuggccaaccuguga

SEQ ID NO: 2527 - RNA, 1251 nt, Artificial Sequence
  BAG61782 variant
augguggacuaccacgccgccaaccagagcuaccaguacggccccagcagcgccggcaacggcgccggcggcggcggcagcaugggcgacuacauggcccaggaggacgacugggacagagaccugcugcuggaccccgccugggagaagcagcagagaaagaccuucaccgccuggugcaacagccaccugagaaaggccggcacccagaucgagaacaucgacgaggacuucagagacggccugaagcugaugcugcugcuggaggugaucagcggcgagagacugcccaagcccgagagaggcaagaugagagugcacaagaucaacaacgugaacaaggcccuggacuucaucgccagcaagggcgugaagcuggugagcaucggcgccgaggagaucguggacggcaacgccaagaugacccugggcaugaucuggaccaucauccugagauucgccauccaggacaucagcguggaggagaccagcgccaaggagggccugcugcuguggugccagagaaagaccgcccccuacaagaacgugaacgugcagaacuuccacaucagcuggaaggacggccuggccuucaacgcccugauccacagacacagacccgagcugaucgaguacgacaagcugagaaaggacgaccccgugaccaaccugaacaacgccuucgagguggccgagaaguaccuggacauccccaagaugcuggacgccgaggacaucgugaacaccgccagacccgacgagaaggccaucaugaccuacgugagcagcuucuaccacgccuucagcggcgcccagaaggccgagaccgccgccaacagaaucugcaaggugcuggccgugaaccaggagaacgagcaccugauggaggacuacgagaagcuggccagcgaccugcuggaguggaucagaagaaccauccccuggcuggaggacagagugccccagaagaccauccaggagaugcagcagaagcuggaggacuucagagacuacagaagagugcacaagccccccaaggugcaggagaagugccagcuggagaucaacuucaacacccugcagaccaagcugagacugagcaacagacccgccuucaugcccagcuggagaagcagagccagcagcagccccaccagcaccugcgccgccagcagccccgccagacccaugcuguggggccccggcagcagacccagauggagaagaagcggcgccagcccccugagauga

SEQ ID NO: 2528 - RNA, 1689 nt, Artificial Sequence
  BAG65349 variant
augguggacuaccacgccgccaaccagagcuaccaguacggccccagcagcgccggcaacggcgccggcggcggcggcagcaugggcgacuacauggcccaggaggacgacugggacagagaccugcugcuggaccccgccugggagaagcagcagagaaagaccuucaccgccuggugcaacagccaccugagaaaggccggcacccagaucgagaacaucgacgaggacuucagagacggccugaagcugaugcugcugcuggaggugaucagcggcgagagacugcccaagcccgagagaggcaagaugagagugcacaagaucaacaacgugaacaaggcccuggacuucaucgccagcaagggcgugaagcuggugagcaucggcgccgaggagaucguggacggcaacgccaagaugacccugggcaugaucuggaccaucauccugagauucgccauccaggacaucagcguggaggagaccagcgccaaggagggccugcugcuguggugccagagaaagaccgcccccuacaagaacgugaacgugcagaacuuccacaucagcuggaaggacggccuggccuucaacgcccugauccacagacacagacccgagcugaucgaguacgacaagcugagaaaggacgaccccgugaccaaccugaacaacgccuucgagguggccgagaaguaccuggacauccccaagaugcuggacgccgaggacaucgugaacaccgccagacccgacgagaaggccaucaugaccuacgugagcagcuucuaccacgccuucagcggcgcccagaaggccgagaccgccgccaacagaaucugcaaggugcuggccgugaaccaggagaacgagcaccugauggaggacuacgagaagcuggccagcgaccugcuggaguggauccagagaaccauccccuggcuggaggacagagugccccagaaggccauccaggagaugcagcagaagcuggaggacuucagagacuacagaagagugcacaagccccccaaggugcaggagaagugccagcuggagaucaacuucaacacccugcagaccaagcugagacugagcaacagacccgccuucaugcccagcgagggcaagauggugagcgacaucaacaacggcuggcagcaccuggagcaggccgagaagggcuacgaggaguggcugcugaacgagaucagaagacuggagagacuggaccaccuggccgagaaguucagacagaaggccagcauccacgaggccuggaccgacggcaaggaggccaugcugaagcacagagacuacgagaccgccacccugagcgacaucaaggcccugaucagaaagcacgaggccuucgagagcgaccuggccgcccaccaggacagaguggagcagaucgccgccaucgcccaggagcugaacgagcuggacuacuacgacagccacaacgugaacacccccgacggccugcaggagggccccggccagccccacagccccauccccccccugugcaucuacgccaagcacagccugcagagcagcggcgugggcggcugggccggcagaggcuggggcagacugagcccccugagccugugcggccuggccagaagauuccccagacccggcuggggcgaccugggccccgcccugcuggugugguga

SEQ ID NO: 2529 - RNA, 2736 nt, Artificial Sequence
  AAH05033 variant
augguggacuaccacgccgccaaccagagcuaccaguacggccccagcagcgccggcaacggcgccggcggcggcggcagcaugggcgacuacauggcccaggaggacgacugggacagagaccugcugcuggaccccgccugggagaagcagcagagaaagaccuucaccgccuggugcaacagccaccugagaaaggccggcacccagaucgagaacaucgacgaggacuucagagacggccugaagcugaugcugcugcuggaggugaucagcggcgagagacugcccaagcccgagagaggcaagaugagagugcacaagaucaacaacgugaacaaggcccuggacuucaucgccagcaagggcgugaagcuggugagcaucggcgccgaggagaucguggacggcaacgccaagaugacccugggcaugaucuggaccaucauccugagauucgccauccaggacaucagcguggaggagaccagcgccaaggagggccugcugcuguggugccagagaaagaccgcccccuacaagaacgugaacgugcagaacuuccacaucagcuggaaggacggccuggccuucaacgcccugauccacagacacagacccgagcugaucgaguacgacaagcugagaaaggacgaccccgugaccaaccugaacaacgccuucgagguggccgagaaguaccuggacauccccaagaugcuggacgccgaggacaucgugaacaccgccagacccgacgagaaggccaucaugaccuacgugagcagcuucuaccacgccuucagcggcgcccagaaggccgagaccgccgccaacagaaucugcaaggugcuggccgugaaccaggagaacgagcaccugauggaggacuacgagaagcuggccagcgaccugcuggaguggaucagaagaaccauccccuggcuggaggacagagugccccagaagaccauccaggagaugcagcagaagcuggaggacuucagagacuacagaagagugcacaagccccccaaggugcaggagaagugccagcuggagaucaacuucaacacccugcagaccaagcugagacugagcaacagacccgccuucaugcccagcgagggcaagauggugagcgacaucaacaacggcuggcagcaccuggagcaggccgagaagggcuacgaggaguggcugcugaacgagaucagaagacuggagagacuggaccaccuggccgagaaguucagacagaaggccagcauccacgaggccuggaccgacggcaaggaggccaugcugaagcacagagacuacgagaccgccacccugagcgacaucaaggcccugaucagaaagcacgaggccuucgagagcgaccuggccgcccaccaggacagaguggagcagaucgccgccaucgcccaggagcugaacgagcuggacuacuacgacagccacaacgugaacaccagaugccagaagaucugcgaccagugggacgcccugggcagccugacccacagcagaagagaggcccuggagaagaccgagaagcagcuggaggccaucgaccagcugcaccuggaguacgccaagagagccgcccccuucaacaacuggauggagagcgccauggaggaccugcaggacauguucaucgugcacaccaucgaggagaucgagggccugaucagcgcccacgaccaguucaagagcacccugcccgacgccgacagagagagagaggccauccuggccauccacaaggaggcccagagaaucgccgagagcaaccacaucaagcugagcggcagcaaccccuacaccaccgugaccccccagaucaucaacagcaagugggagaaggugcagcagcuggugcccaagagagaccacgcccugcuggaggagcagagcaagcagcagagcaacgagcaccugagaagacaguucgccagccaggccaacguggugggccccuggauccagaccaagauggaggagaucggcagaaucagcaucgagaugaacggcacccuggaggaccagcugagccaccugaagcaguacgagagaagcaucguggacuacaagcccaaccuggaccugcuggagcagcagcaccagcugauccaggaggcccugaucuucgacaacaagcacaccaacuacaccauggagcacaucagagugggcugggagcagcugcugaccaccaucgccagaaccaucaacgagguggagaaccagauccugaccagagacgccaagggcaucagccaggagcagaugcaggaguucagagccagcuucaaccacuucgacaaggaccacggcggcgcccugggccccgaggaguucaaggccugccugaucagccugggcuacgacguggagaacgacagacagggcgaggccgaguucaacagaaucaugagccugguggaccccaaccacagcggccuggugaccuuccaggccuucaucgacuucaugagcagagagaccaccgacaccgacaccgccgaccaggugaucgccagcuucaaggugcuggccggcgacaagaacuucaucaccgccgaggagcugagaagagagcugccccccgaccaggccgaguacugcaucgccagaauggcccccuaccagggccccgacgccgugcccggcgcccuggacuacaagagcuucagcaccgcccuguacggcgagagcgaccuguga

SEQ ID NO: 2530 - RNA, 597 nt, Artificial Sequence
  EAX10817 variant
auggcccugcagggcaucagcgugauggagcugagcggccuggcccccggccccuucugcgccauggugcuggccgacuucggcgccagaguggugagaguggacagacccggcagcagauacgacgugagcagacugggcagaggcaagagaagccuggugcuggaccugaagcagcccagaggcgccgccgugcugagaagacugugcaagagaagcgacgugcugcuggagcccuucagaagaggcgugauggagaagcugcagcugggccccgagauccugcagagagagaaccccagacugaucuacgccagacugagcggcuucggccagagcggcagcuucugcagacuggccggccacgacaucaacuaccuggcccugagcggcggcagaaacagcaucuucaaguucuucagcguggagaacagcgagaucgagagcgugggcagcaccagcagaaccgagcacgugggcugguggagcaccuuccuguacgaccugcaggacagcagauggggcauccacggcugcuggagcaacagaacccccgugcugagagccgccgaccagagaaccuggaccaagguguga

SEQ ID NO: 2531 - RNA, 597 nt, Artificial Sequence
  BAF85677 variant
auggcccugcagggcaucagcgugguggagcugagcggccuggcccccggccccuucugcgccauggugcuggccgacuucggcgccagaguggugagaguggacagacccggcagcagauacgacgugagcagacugggcagaggcaagagaagccuggugcuggaccugaagcagcccagaggcgccgccgugcugagaagacugugcaagagaagcgacgugcugcuggagcccuucagaagaggcgugauggagaagcugcagcugggccccgagauccugcagagagagaaccccagacugaucuacgccagacugagcggcuucggccagagcggcagcuucugcagacuggccggccacgacaucaacuaccuggcccugagcggcggcagaaacagcaucuucaaguucuucagcguggagaacagcgagaucgagagcgugggcagcaccagcagaaccgagcacgugggcugguggagcaccuuccuguacgaccugcaggacagcagauggggcauccacggcugcuggagcaacagaacccccuuccugagagccgccgaccagagaaccuggaccaagguguga

SEQ ID NO: 2532 - RNA, 2763 nt, Artificial Sequence
  EAX05380 variant
auggaggugcagcugggccugggcagaguguaccccagaccccccagcaagaccuacagaggcgccuuccagaaccuguuccagagcgugagagaggugauccagaaccccggccccagacaccccgaggccgccagcgccgccccccccggcgccagccugcugcugcugcagcagcagcagcagcagcagcagcagcagcagcagcagcagcagcagcagcagcagcagcagcagcaggagaccagccccagacagcagcagcagcagcagggcgaggacggcagcccccaggcccacagaagaggccccaccggcuaccuggugcuggacgaggagcagcagcccagccagccccagagcgcccuggagugccaccccgagagaggcugcgugcccgagcccggcgccgccguggccgccagcaagggccugccccagcagcugcccgccccccccgacgaggacgacagcgccgcccccagcacccugagccugcugggccccaccuuccccggccugagcagcugcagcgccgaccugaaggacauccugagcgaggccagcaccaugcagcugcugcagcagcagcagcaggaggccgugagcgagggcagcagcagcggcagagccagagaggccagcggcgcccccaccagcagcaaggacaacuaccugggcggcaccagcaccaucagcgacaacgccaaggagcugugcaaggccgugagcgugagcaugggccugggcguggaggcccuggagcaccugagccccggcgagcagcugagaggcgacugcauguacgccccccugcugggcgugccccccgccgugagacccacccccugcgccccccuggccgagugcaagggcagccugcuggacgacagcgccggcaagagcaccgaggacaccgccgaguacagccccuucaagggcggcuacaccaagggccuggagggcgagagccugggcugcagcggcagcgccgccgccggcagcagcggcacccuggagcugcccagcacccugagccuguacaagagcggcgcccuggacgaggccgccgccuaccagagcagagacuacuacaacuucccccuggcccuggccggccccccccccccccccccccccccccacccccacgccagaaucaagcuggagaacccccuggacuacggcagcgccugggccgccgccgccgcccagugcagauacggcgaccuggccagccugcacggcgccggcgccgccggccccggcagcggcagccccagcgccgccgccagcagcagcuggcacacccuguucaccgccgaggagggccagcuguacggccccugcggcggcggcggcggcggcggcggcggcggcggcggcggcggcggcggcggcggcggcggcggcggcggcgaggccggcgccguggcccccuacggcuacaccagacccccccagggccuggccggccaggagagcgacuucaccgcccccgacgugugguaccccggcggcauggugagcagagugcccuaccccagccccaccugcgugaagagcgagaugggccccuggauggacagcuacagcggccccuacggcgacaugagacuggagaccgccagagaccacgugcugcccaucgacuacuacuuccccccccagaagaccugccugaucugcggcgacgaggccagcggcugccacuacggcgcccugaccugcggcagcugcaagguguucuucaagagagccgccgagggcaagcagaaguaccugugcgccagcagaaacgacugcaccaucgacaaguucagaagaaagaacugccccagcugcagacugagaaagugcuacgaggccggcaugacccugggcgccagaaagcugaagaagcugggcaaccugaagcugcaggaggagggcgaggccagcagcaccaccagccccaccgaggagaccacccagaagcugaccgugagccacaucgagggcuacgagugccagcccaucuuccugaacgugcuggaggccaucgagcccggcguggugugcgccggccacgacaacaaccagcccgacagcuucgccgcccugcugagcagccugaacgagcugggcgagagacagcuggugcacguggugaagugggccaaggcccugcccggcuucagaaaccugcacguggacgaccagauggccgugauccaguacagcuggaugggccugaugguguucgccaugggcuggagaagcuucaccaacgugaacagcagaaugcuguacuucgcccccgaccugguguucaacgaguacagaaugcacaagagcagaauguacagccagugcgugagaaugagacaccugagccaggaguucggcuggcugcagaucaccccccaggaguuccugugcaugaaggcccugcugcuguucagcaucauccccguggacggccugaagaaccagaaguucuucgacgagcugagaaugaacuacaucaaggagcuggacagaaucaucgccugcaagagaaagaaccccaccagcugcagcagaagauucuaccagcugaccaagcugcuggacagcgugcagcccaucgccagagagcugcaccaguucaccuucgaccugcugaucaagagccacauggugagcguggacuuccccgagaugauggccgagaucaucagcgugcaggugcccaagauccugagcggcaaggugaagcccaucuacuuccacacccaguga

SEQ ID NO: 2533 - RNA, 1239 nt, Artificial Sequence
  AAH64630 variant
auggcccccguggagcacgugguggccgacgccggcgccuuccugagacacgccgcccugcaggacaucggcaagaacaucuacaccaucagagagguggugaccgagaucagagacaaggccaccagaagaagacuggccgugcugcccuacgagcugagauucaaggagccccugcccgaguacgugagacuggugaccgaguucagcaagaagaccggcgacuaccccagccugagcgccaccgacauccaggugcuggcccugaccuaccagcuggaggccgaguucgugggcgugagccaccugaagcaggagccccagaaggugaaggugagcagcagcauccagcaccccgagaccccccugcacaucagcggcuuccaccugcccuacaagcccaagcccccccaggagaccgagaagggccacagcgccugcgagcccgagaaccuggaguucagcagcuucauguucuggagaaacccccugcccaacaucgaccacgagcugcaggagcugcugaucgacagaggcgaggacgugcccagcgaggaggaggaggaggaggagaacggcuucgaggacagaaaggacgacagcgacgacgacggcggcggcuggaucacccccagcaacaucaagcagauccagcaggagcuggagcagugcgacgugcccgaggacgugagagugggcugccugaccaccgacuucgccaugcagaacgugcugcugcagaugggccugcacgugcuggccgugaacggcaugcugaucagagaggccagaagcuacauccugagaugccacggcugcuucaagaccaccagcgacaugagcagaguguucugcagccacugcggcaacaagacccugaagaaggugagcgugaccgugagcgacgacggcacccugcacaugcacuucagcagaaaccccaaggugcugaaccccagaggccugagauacagccugcccacccccaagggcggcaaguacgccaucaacccccaccugaccgaggaccagagauucccccagcugagacugagccagaaggccagacagaagaccaacguguucgcccccgacuacaucgccggcgugagccccuucguggagaacgacaucagcagcagaagcgccacccugcaggugagagacagcacccugggcgccggcagaagaagacugaaccccaacgccagcagaaagaaguucgugaagaagagauga

SEQ ID NO: 2534 - RNA, 984 nt, Artificial Sequence
  AAH69102 variant
augcagaugcccgccaugaugagccugcugcuggugagcgugggccugauggaggcccugcaggcccagagccaccccaucaccagaagagaccuguucagccaggagauccagcuggacauggcccuggccagcuucgacgaccaguacgccggcugcgccgccgccaugaccgccgcccugcccgaccugaaccacaccgaguuccaggccaaccagguguacgccgacagcuggacccuggccagcagccaguggcaggagagacaggccagauggcccgaguggagccugagccccaccagacccagcccccccccccugggcuucagagacgagcacggcguggcccugcuggccuacaccgccaacagcccccugcacaaggaguucaacgccgccgugagagaggccggcagaagcagagcccacuaccugcaccacuucagcuucaagacccugcacuuccugcugaccgaggcccugcagcugcugggcagcggccagagaccccccagaugccaccagguguucagaggcgugcacggccugagauucagacccgccggccccagagccaccgugagacugggcggcuucgccagcgccagccugaagcacguggccgcccagcaguucggcgaggacaccuucuucggcaucuggaccugccugggcgcccccaucaagggcuacagcuucuuccccggcgaggaggaggugcugaucccccccuucgagaccuuccaggugaucaacgccagcagacuggcccagggccccgccagaaucuaccugagagcccugggcaagcacagcaccuacaacugcgaguacaucaaggacaagaagugcaagagcggccccugccaccuggacaacagcgccaugggccagagcccccugagcgccguguggagccugcugcugcugcugugguuccugguggugagagccuuccccgacggccccggccugcuguga

SEQ ID NO: 2535 - RNA, 1035 nt, Artificial Sequence
  AAH09751 variant
auggcccagaaggagaacagcuaccccuggcccuacggcagacagaccgcccccagcggccugagcacccugccccagagagugcugagaaaggagcccgugacccccagcgcccuggugcugaugagcagaagcaacgugcagcccaccgccgcccccggccagaaggugauggagaacagcagcggcacccccgacauccugaccagacacuucaccaucgacgacuucgagaucggcagaccccugggcaagggcaaguucggcaacguguaccuggccagagagaagaagagccacuucaucguggcccugaaggugcuguucaagagccagaucgagaaggagggcguggagcaccagcugagaagagagaucgagauccaggcccaccugcaccaccccaacauccugagacuguacaacuacuucuacgacagaagaagaaucuaccugauccuggaguacgcccccagaggcgagcuguacaaggagcugcagaagagcugcaccuucgacgagcagagaaccgccaccaucauggaggagcuggccgacgcccugauguacugccacggcaagaaggugauccacagagacaucaagcccgagaaccugcugcugggccugaagggcgagcugaagaucgccgacuucggcuggagcgugcacgcccccagccugagaagaaagaccaugugcggcacccuggacuaccugccccccgagaugaucgagggcagaaugcacaacgagaagguggaccuguggugcaucggcgugcugugcuacgagcugcuggugggcaacccccccuucgagagcgccagccacaacgagaccuacagaagaaucgugaagguggaccugaaguuccccgccagcgugcccaugggcgcccaggaccugaucagcaagcugcugagacacaaccccagcgagagacugccccuggcccaggugagcgcccaccccugggugagagccaacagcagaagagugcugccccccagcgcccugcagagcguggccuga

SEQ ID NO: 2536 - RNA, 360 nt, Artificial Sequence
  AAD48083 variant
augagcagaagcguggcccuggccgugcuggcccugcugagccugagcggccuggaggccauccagagaacccccaagauccagguguacagcagacaccccgccgagaacggcaagagcaacuuccugaacugcuacgugagcggcuuccaccccagcgacaucgagguggaccugcugaagaacggcgagagaaucgagaagguggagcacagcgaccugagcuucagcaaggacuggagcuucuaccugcuguacuacaccgaguucacccccaccgagaaggacgaguacgccugcagagugaaccacgugacccugagccagcccaagaucgugaagugggacagagacauguga

SEQ ID NO: 2537 - RNA, 1137 nt, Artificial Sequence
  AAH28058 variant
augagaaugcuggugagcggcagaagagugaagaaguggcagcugaucauccagcuguucgccaccugcuuccuggccagccugauguucuucugggagcccaucgacaaccacaucgugagccacaugaagagcuacagcuacagauaccugaucaacagcuacgacuucgugaacgacacccugagccugaagcacaccagcgccggccccagauaccaguaccugaucaaccacaaggagaagugccaggcccaggacgugcugcugcugcuguucgugaagaccgcccccgagaacuacgacagaagaagcggcaucagaagaaccuggggcaacgagaacuacgugagaagccagcugaacgccaacaucaagacccuguucgcccugggcacccccaacccccuggagggcgaggagcugcagagaaagcuggccugggaggaccagagauacaacgacaucauccagcaggacuucguggacagcuucuacaaccugacccugaagcugcugaugcaguucagcugggccaacaccuacugcccccacgccaaguuccugaugaccgccgacgacgacaucuucauccacaugcccaaccugaucgaguaccugcagagccuggagcagaucggcgugcaggacuucuggaucggcagagugcacagaggcgccccccccaucagagacaagagcagcaaguacuacgugagcuacgagauguaccaguggcccgccuaccccgacuacaccgccggcgccgccuacgugaucagcggcgacguggccgccaagguguacgaggccagccagacccugaacagcagccuguacaucgacgacguguucaugggccugugcgccaacaagaucggcaucgugccccaggaccacguguucuucagcggcgagggcaagacccccuaccaccccugcaucuacgagaagaugaugaccagccacggccaccuggaggaccugcaggaccuguggaagaacgccaccgaccccaaggugaagaccaucagcaagggcuucuucggccagaucuacugcagacugaugaagaucauccugcugugcaagaucagcuacguggacaccuaccccugcagagccgccuucaucuga

SEQ ID NO: 2538 - RNA, 1602 nt, Artificial Sequence
  AAA35516 variant
auguggcugggcagaagagcccugugcgcccuggugcugcugcuggccugcgccagccugggccugcuguacgccagcaccagagacgcccccggccugagacugccccuggcccccugggcccccccccagagccccagaagacccgagcugcccgaccuggcccccgagcccagauacgcccacauccccgugagaaucaaggagcagguggugggccugcuggccuggaacaacugcagcugcgagagcagcggcggcggccugccccugcccuuccagaagcaggugagagccaucgaccugaccaaggccuucgaccccgccgagcugagagccgccagcgccaccagagagcaggaguuccaggccuuccugagcagaagccagagccccgccgaccagcugcugaucgcccccgccaacagcccccugcaguacccccugcagggcguggaggugcagccccugagaagcauccuggugcccggccugagccugcaggccgccagcggccaggagguguaccaggugaaccugaccgccagccugggcaccugggacguggccggcgaggugaccggcgugacccugaccggcgagggccaggccgaccugacccuggugagccccggccuggaccagcugaacagacagcugcagcuggugaccuacagcagcagaagcuaccagaccaacaccgccgacaccgugagauucagcaccgagggccacgaggccgccuucaccaucagaaucagacacccccccaaccccagacuguacccccccggcagccugccccagggcgcccaguacaacaucagcgcccuggugaccaucgccaccaagaccuuccugagauacgacagacugagagcccugaucaccagcaucagaagauucuaccccaccgugaccguggugaucgccgacgacagcgacaagcccgagagagugagcggccccuacguggagcacuaccugaugcccuucggcaagggcugguucgccggcagaaaccuggccgugagccaggugaccaccaaguacgugcuguggguggacgacgacuucguguucaccgccagaaccagacuggagagacugguggacgugcuggagagaaccccccuggaccuggugggcggcgccgugagagagaucagcggcuucgccaccaccuacagacagcugcugagcguggagcccggcgcccccggccugggcaacugccugagacagagaagaggcuuccaccacgagcuggugggcuuccccggcugcguggugaccgacggcguggugaacuucuuccuggccagaaccgacaaggugagagaggugggcuucgaccccagacugagcagaguggcccaccuggaguucuuccuggacggccugggcagccugagagugggcagcugcagcgacguggugguggaccacgccagcaagcugaagcugcccuggaccagcagagacgccggcgccgagaccuacgccagauacagauaccccggcagccuggacgagagccagauggccaagcacagacugcuguucuucaagcacagacugcagugcaugaccagccaguga

SEQ ID NO: 2539 - RNA, 849 nt, Artificial Sequence
  AAH74729 variant
auggccagccugggccagauccuguucuggagcaucaucagcaucaucaucauccuggccggcgccaucgcccugaucaucggcuucggcaucagcggcagacacagcaucaccgugaccaccguggccagcgccggcaacaucggcgaggacggcauccugagcugcaccuucgagcccgacaucaagcugagcgacaucgugauccaguggcugaaggagggcgugcugggccuggugcacgaguucaaggagggcaaggacgagcugagcgagcaggacgagauguucagaggcagaaccgccguguucgccgaccaggugaucgugggcaacgccagccugagacugaagaacgugcagcugaccgacgccggcaccuacaagugcuacaucaucaccagcaagggcaagggcaacgccaaccuggaguacaagaccggcgccuucagcaugcccgaggugaacguggacuacaacgccagcagcgagacccugagaugcgaggcccccagaugguucccccagcccaccguggugugggccagccagguggaccagggcgccaacuucagcgaggugagcaacaccagcuucgagcugaacagcgagaacgugaccaugaagguggugagcgugcuguacaacgugaccaucaacaacaccuacagcugcaugaucgagaacgacaucgccaaggccaccggcgacaucaaggugaccgagagcgagaucaagagaagaagccaccugcagcugcugaacagcaaggccagccugugcgugagcagcuucuucgccaucagcugggcccugcugccccugagccccuaccugaugcugaaguga

SEQ ID NO: 2540 - RNA, 132 nt, Artificial Sequence
  AAC50123 variant
auggccgccagagccguguuccuggcccugagcgcccagcugcugcaggccagacugaugaaggaggagagccccguggugagcuggagacuggagcccgaggacggcaccgcccugugcuucaucuucuga

SEQ ID NO: 2541 - RNA, 1158 nt, Artificial Sequence
  AAN40694 variant
auggccgccgcccuguucgugcugcugggcuucgcccugcugggcacccacggcgccagcggcgccgccggcuucgugcaggccccccugagccagcagagaugggugggcggcagcguggagcugcacugcgaggccgugggcagccccgugcccgagauccaguggugguucgagggccagggccccaacgacaccugcagccagcugugggacggcgccagacuggacagagugcacauccacgccaccuaccaccagcacgccgccagcaccaucagcaucgacacccugguggaggaggacaccggcaccuacgagugcagagccagcaacgaccccgacagaaaccaccugaccagagcccccagagugaagugggugagagcccaggccguggugcuggugcuggagcccggcaccguguucaccaccguggaggaccugggcagcaagauccugcugaccugcagccugaacgacagcgccaccgaggugaccggccacagauggcugaagggcggcguggugcugaaggaggacgcccugcccggccagaagaccgaguucaagguggacagcgacgaccaguggggcgaguacagcugcguguuccugcccgagcccaugggcaccgccaacauccagcugcacggcccccccagagugaaggccgugaagagcagcgagcacaucaacgagggcgagaccgccaugcuggugugcaagagcgagagcgugccccccgugaccgacugggccugguacaagaucaccgacagcgaggacaaggcccugaugaacggcagcgagagcagauucuucgugagcagcagccagggcagaagcgagcugcacaucgagaaccugaacauggaggccgaccccggccaguacagaugcaacggcaccagcagcaagggcagcgaccaggccaucaucacccugagagugagaagccaccuggccgcccuguggcccuuccugggcaucguggccgaggugcuggugcuggugaccaucaucuucaucuacgagaagagaagaaagcccgaggacgugcuggacgacgacgacgccggcagcgccccccugaagagcagcggccagcaccagaacgacaagggcaagaacgugagacagagaaacagcagcuga

SEQ ID NO: 2542 - RNA, 720 nt, Artificial Sequence
  ABX60202 variant
auggcccacgccggcagaaccggcuacgacaacagagagaucgugaugaaguacauccacuacaagcugagccagagaggcuacgagugggacgccggcgacgugggcgccgccccccccggcgccgcccccgcccccggcaucuucagcagccagcccggccacaccccccaccccgccgccagcagagaccccguggccagaaccagcccccugcagacccccgccgcccccggcgccgccgccggccccgcccugagccccgugccccccguggugcaccugacccugagacaggccggcgacgacuucagcagaagauacagaagagacuucgccgagaugagcagccagcugcaccugacccccuucaccgccagaggcagauucgccaccgugguggaggagcuguucagagacggcgugaacuggggcagaaucguggccuucuucgaguucggcggcgugaugugcguggagagcgugaacagagagaugagcccccugguggacaacaucgcccuguggaugaccgaguaccugaacagacaccugcacaccuggauccaggacaacggcggcugggacgccuucguggagcuguacggccccagcaugagaccccuguucgacuucagcuggcugagccugaagacccugcugagccuggcccuggugggcgccugcaucacccugggcgccuaccugagccacaaguga

SEQ ID NO: 2543 - RNA, 1290 nt, Artificial Sequence
  ABX82700 variant
augguggaccccgugggcuucgccgaggccuggaaggcccaguuccccgacagcgagccccccagaauggagcugagaagcgugggcgacaucgagcaggagcuggagagaugcaaggccagcaucagaagacuggagcaggaggugaaccaggagagauucagaaugaucuaccugcagacccugcuggccaaggagaagaagagcuacgacagacagagauggggcuucagaagagccgcccaggcccccgacggcgccagcgagcccagagccagcgccagcagaccccagcccgcccccgccgacggcgccgaccccccccccgccgaggagcccgaggccagacccgacggcgagggcagccccggcaaggccagacccggcaccgccagaagacccggcgccgccgccagcggcgagagagacgacagaggcccccccgccagcguggccgcccugagaagcaacuucgagagaaucagaaagggccacggccagcccggcgccgacgccgagaagcccuucuacgugaacguggaguuccaccacgagagaggccuggugaaggugaacgacaaggaggugagcgacagaaucagcagccugggcagccaggccaugcagauggagagaaagaagagccagcacggcgccggcagcagcgugggcgacgccagcagaccccccuacagaggcagaagcagcgagagcagcugcggcguggacggcgacuacgaggacgccgagcugaaccccagauuccugaaggacaaccugaucgacgccaacggcggcagcagaccccccuggcccccccuggaguaccagcccuaccagagcaucuacgugggcggcaugauggagggcgagggcaagggcccccugcugagaagccagagcaccagcgagcaggagaagagacugaccuggcccagaagaagcuacagccccagaagcuucgaggacugcggcggcggcuacacccccgacugcagcagcaacgagaaccugaccagcagcgaggaggacuucagcagcggccagagcagcagagugagccccagccccaccaccuacagaauguucagagacaagagcagaagccccagccagaacagccagcagagcuucgacagcagcagcccccccaccccccagugccacaagagacacagacacugccccgugguggugagcgaggccaccaucgugggcgugagaaagaccggccagaucuggcccaacgacggcgagggcgccuuccacggcgacgccgacggcggcuga

SEQ ID NO: 2544 - RNA, 1665 nt, Artificial Sequence
  ABX82703 variant
augguggaccccgugggcuucgccgaggccuggaaggcccaguuccccgacagcgagccccccagaauggagcugagaagcgugggcgacaucgagcaggagcuggagagaugcaaggccagcaucagaagacuggagcaggaggugaaccaggagagauucagaaugaucuaccugcagacccugcuggccaaggagaagaagagcuacgacagacagagauggggcuucagaagagccgcccaggcccccgacggcgccagcgagcccagagccagcgccagcagaccccagcccgcccccgccgacggcgccgaccccccccccgccgaggagcccgaggccagacccgacggcgagggcagccccggcaaggccagacccggcaccgccagaagacccggcgccgccgccagcggcgagagagacgacagaggcccccccgccagcguggccgcccugagaagcaacuucgagagaaucagaaagggccacggccagcccggcgccgacgccgagaagcccuucuacgugaacguggaguuccaccacgagagaggccuggugaaggugaacgacaaggaggugagcgacagaaucagcagccugggcagccaggccaugcagauggagagaaagaagagccagcacggcgccggcagcagcgugggcgacgccagcagaccccccuacagaggcagaagcagcgagagcagcugcggcguggacggcgacuacgaggacgccgagcugaaccccagauuccugaaggacaaccugaucgacgccaacggcggcagcagaccccccuggcccccccuggaguaccagcccuaccagagcaucuacgugggcggcaugauggagggcgagggcaagggcccccugcugagaagccagagcaccagcgagcaggagaagagacugaccuggcccagaagaagcuacagccccagaagcuucgaggacugcggcggcggcuacacccccgacugcagcagcaacgagaaccugaccagcagcgaggaggacuucagcagcggccagagcagcagagugagccccagccccaccaccuacagaauguucagagacaagagcagaagccccagccagaacagccagcagagcuucgacagcagcagcccccccaccccccagugccacaagagacacagacacugccccgugguggugagcgaggccaccaucgugggcgugagaaagaccggccagaucuggcccaacgacggcgagggcgccuuccacggcgacgccgacggcagcuucggcaccccccccggcuacggcugcgccgccgacagagccgaggagcagagaagacaccaggacggccugcccuacaucgacgacagccccagcagcagcccccaccugagcagcaagggcagaggcagcagagacgcccuggugagcggcgcccuggagagcaccaaggccagcgagcuggaccuggagaagggccuggagaugagaaagugggugcugagcggcauccuggccagcgaggagaccuaccugagccaccuggaggcccugcugcugcccaugaagccccugaaggccgccgccaccaccagccagcccgugcugaccagccagcagaucgagaccaucuucuucaaggugcccgaccugcuguga

SEQ ID NO: 2545 - RNA, 1545 nt, Artificial Sequence
  ABX82704 variant
augguggaccccgugggcuucgccgaggccuggaaggcccaguuccccgacagcgagccccccagaauggagcugagaagcgugggcgacaucgagcaggagcuggagagaugcaaggccagcaucagaagacuggagcaggaggugaaccaggagagauucagaaugaucuaccugcagacccugcuggccaaggagaagaagagcuacgacagacagagauggggcuucagaagagccgcccaggcccccgacggcgccagcgagcccagagccagcgccagcagaccccagcccgcccccgccgacggcgccgaccccccccccgccgaggagcccgaggccagacccgacggcgagggcagccccggcaaggccagacccggcaccgccagaagacccggcgccgccgccagcggcgagagagacgacagaggcccccccgccagcguggccgcccugagaagcaacuucgagagaaucagaaagggccacggccagcccggcgccgacgccgagaagcccuucuacgugaacguggaguuccaccacgagagaggccuggugaaggugaacgacaaggaggugagcgacagaaucagcagccugggcagccaggccaugcagauggagagaaagaagagccagcacggcgccggcagcagcgugggcgacgccagcagaccccccuacagaggcagaagcagcgagagcagcugcggcguggacggcgacuacgaggacgccgagcugaaccccagauuccugaaggacaaccugaucgacgccaacggcggcagcagaccccccuggcccccccuggaguaccagcccuaccagagcaucuacgugggcggcaugauggagggcgagggcaagggcccccugcugagaagccagagcaccagcgagcaggagaagagacugaccuggcccagaagaagcuacagccccagaagcuucgaggacugcggcggcggcuacacccccgacugcagcagcaacgagaaccugaccagcagcgaggaggacuucagcagcggccagagcagcagagugagccccagccccaccaccuacagaauguucagagacaagagcagaagccccagccagaacagccagcagagcuucgacagcagcagcccccccaccccccagugccacaagagacacagacacugccccgugguggugagcgaggccaccaucgugggcgugagaaagaccggccagaucuggcccaacgacggcgagggcgccuuccacggcgacgccgacggcagcuucggcaccccccccggcuacggcugcgccgccgacagagccgaggagcagagaagacaccaggacggccugcccuacaucgacgacagccccagcagcagcccccaccugagcagcaagggcagaggcagcagagacgcccuggugagcggcgcccuggagagcaccaaggccagcgagcuggaccuggagaagggccuggagaugagaaagugggugcugagcggcauccuggccagcgaggagaucacccuguga

SEQ ID NO: 2546 - RNA, 1326 nt, Artificial Sequence
  ABX82705 variant
augguggaccccgugggcuucgccgaggccuggaaggcccaguuccccgacagcgagccccccagaauggagcugagaagcgugggcgacaucgagcaggagcuggagagaugcaaggccagcaucagaagacuggagcaggaggugaaccaggagagauucagaaugaucuaccugcagacccugcuggccaaggagaagaagagcuacgacagacagagauggggcuucagaagagccgcccaggcccccgacggcgccagcgagcccagagccagcgccagcagaccccagcccgcccccgccgacggcgccgaccccccccccgccgaggagcccgaggccagacccgacggcgagggcagccccggcaaggccagacccggcaccgccagaagacccggcgccgccgccagcggcgagagagacgacagaggcccccccgccagcguggccgcccugagaagcaacuucgagagaaucagaaagggccacggccagcccggcgccgacgccgagaagcccuucuacgugaacguggaguuccaccacgagagaggccuggugaaggugaacgacaaggaggugagcgacagaaucagcagccugggcagccaggccaugcagauggagagaaagaagagccagcacggcgccggcagcagcgugggcgacgccagcagaccccccuacagaggcagaagcagcgagagcagcugcggcguggacggcgacuacgaggacgccgagcugaaccccagauuccugaaggacaaccugaucgacgccaacggcggcagcagaccccccuggcccccccuggaguaccagcccuaccagagcaucuacgugggcggcaugauggagggcgagggcaagggcccccugcugagaagccagagcaccagcgagcaggagaagagacugaccuggcccagaagaagcuacagccccagaagcuucgaggacugcggcggcggcuacacccccgacugcagcagcaacgagaaccugaccagcagcgaggaggacuucagcagcggccagagcagcagagugagccccagccccaccaccuacagaauguucagagacaagagcagaagccccagccagaacagccagcagagcuucgacagcagcagcccccccaccccccagugccacaagagacacagacacugccccgugguggugagcgaggccaccaucgugggcgugagaaagaccggccagaucuggcccaacgacggcgagggcgccuuccacggcgacgccgacggcagccuggagcugcagggcaagcccagcagauggacccaguga

SEQ ID NO: 2547 - RNA, 1575 nt, Artificial Sequence
  ABX82706 variant
augguggaccccgugggcuucgccgaggccuggaaggcccaguuccccgacagcgagccccccagaauggagcugagaagcgugggcgacaucgagcaggagcuggagagaugcaaggccagcaucagaagacuggagcaggaggugaaccaggagagauucagaaugaucuaccugcagacccugcuggccaaggagaagaagagcuacgacagacagagauggggcuucagaagagccgcccaggcccccgacggcgccagcgagcccagagccagcgccagcagaccccagcccgcccccgccgacggcgccgaccccccccccgccgaggagcccgaggccagacccgacggcgagggcagccccggcaaggccagacccggcaccgccagaagacccggcgccgccgccagcggcgagagagacgacagaggcccccccgccagcguggccgcccugagaagcaacuucgagagaaucagaaagggccacggccagcccggcgccgacgccgagaagcccuucuacgugaacguggaguuccaccacgagagaggccuggugaaggugaacgacaaggaggugagcgacagaaucagcagccugggcagccaggccaugcagauggagagaaagaagagccagcacggcgccggcagcagcgugggcgacgccagcagaccccccuacagaggcagaagcagcgagagcagcugcggcguggacggcgacuacgaggacgccgagcugaaccccagauuccugaaggacaaccugaucgacgccaacggcggcagcagaccccccuggcccccccuggaguaccagcccuaccagagcaucuacgugggcggcaugauggagggcgagggcaagggcccccugcugagaagccagagcaccagcgagcaggagaagagacugaccuggcccagaagaagcuacagccccagaagcuucgaggacugcggcggcggcuacacccccgacugcagcagcaacgagaaccugaccagcagcgaggaggacuucagcagcggccagagcagcagagugagccccagccccaccaccuacagaauguucagagacaagagcagaagccccagccagaacagccagcagagcuucgacagcagcagcccccccaccccccagugccacaagagacacagacacugccccgugguggugagcgaggccaccaucgugggcgugagaaagaccggccagaucuggcccaacgacggcgagggcgccuuccacggcgacgccgacggcagcuucggcaccccccccggcuacggcugcgccgccgacagagccgaggagcagagaagacaccaggacggccugcccuacaucgacgacagccccagcagcagcccccaccugagcagcaagggcagaggcagcagagacgcccuggugagcggcgcccuggagagcaccaaggccagcgagcuggaccuggagaagggccuggagaugagaaagugggaccccgugaagaugacccccaccuucagccugcacugcaugauccuguggcccguggagaucacccuguga

SEQ ID NO: 2548 - RNA, 1398 nt, Artificial Sequence
  ABX82707 variant
augguggaccccgugggcuucgccgaggccuggaaggcccaguuccccgacagcgagccccccagaauggagcugagaagcgugggcgacaucgagcaggagcuggagagaugcaaggccagcaucagaagacuggagcaggaggugaaccaggagagauucagaaugaucuaccugcagacccugcuggccaaggagaagaagagcuacgacagacagagauggggcuucagaagagccgcccaggcccccgacggcgccagcgagcccagagccagcgccagcagaccccagcccgcccccgccgacggcgccgaccccccccccgccgaggagcccgaggccagacccgacggcgagggcagccccggcaaggccagacccggcaccgccagaagacccggcgccgccgccagcggcgagagagacgacagaggcccccccgccagcguggccgcccugagaagcaacuucgagagaaucagaaagggccacggccagcccggcgccgacgccgagaagcccuucuacgugaacguggaguuccaccacgagagaggccuggugaaggugaacgacaaggaggugagcgacagaaucagcagccugggcagccaggccaugcagauggagagaaagaagagccagcacggcgccggcagcagcgugggcgacgccagcagaccccccuacagaggcagaagcagcgagagcagcugcggcguggacggcgacuacgaggacgccgagcugaaccccagauuccugaaggacaaccugaucgacgccaacggcggcagcagaccccccuggcccccccuggaguaccagcccuaccagagcaucuacgugggcggcaugauggagggcgagggcaagggcccccugcugagaagccagagcaccagcgagcaggagaagagacugaccuggcccagaagaagcuacagccccagaagcuucgaggacugcggcggcggcuacacccccgacugcagcagcaacgagaaccugaccagcagcgaggaggacuucagcagcggccagagcagcagagugagccccagccccaccaccuacagaauguucagagacaagagcagaagccccagccagaacagccagcagagcuucgacagcagcagcccccccaccccccagugccacaagagacacagacacugccccgugguggugagcgaggccaccaucgugggcgugagaaagaccggccagaucuggcccaacgacggcgagggcgccuuccacggcgagcaccccggcgccgccgaggagguguuccagaagcugcugcccgacaucagaggcgccgccgacgccgaccagcuggugugcgagacccccgacugcccccagcacagcgccgaccaccaguga

SEQ ID NO: 2549 - RNA, 1377 nt, Artificial Sequence
  ABX82709 variant
augguggaccccgugggcuucgccgaggccuggaaggcccaguuccccgacagcgagccccccagaauggagcugagaagcgugggcgacaucgagcaggagcuggagagaugcaaggccagcaucagaagacuggagcaggaggugaaccaggagagauucagaaugaucuaccugcagacccugcuggccaaggagaagaagagcuacgacagacagagauggggcuucagaagagccgcccaggcccccgacggcgccagcgagcccagagccagcgccagcagaccccagcccgcccccgccgacggcgccgaccccccccccgccgaggagcccgaggccagacccgacggcgagggcagccccggcaaggccagacccggcaccgccagaagacccggcgccgccgccagcggcgagagagacgacagaggcccccccgccagcguggccgcccugagaagcaacuucgagagaaucagaaagggccacggccagcccggcgccgacgccgagaagcccuucuacgugaacguggaguuccaccacgagagaggccuggugaaggugaacgacaaggaggugagcgacagaaucagcagccugggcagccaggccaugcagauggagagaaagaagagccagcacggcgccggcagcagcgugggcgacgccagcagaccccccuacagaggcagaagcagcgagagcagcugcggcguggacggcgacuacgaggacgccgagcugaaccccagauuccugaaggacaaccugaucgacgccaacggcggcagcagaccccccuggcccccccuggaguaccagcccuaccagagcaucuacgugggcggcaugauggagggcgagggcaagggcccccugcugagaagccagagcaccagcgagcaggagaagagacugaccuggcccagaagaagcuacagccccagaagcuucgaggacugcggcggcggcuacacccccgacugcagcagcaacgagaaccugaccagcagcgaggaggacuucagcagcggccagagcagcagagugagccccagccccaccaccuacagaauguucagagacaagagcagaagccccagccagaacagccagcagagcuucgacagcagcagcccccccaccccccagugccacaagagacacagacacugccccgugguggugagcgaggccaccaucgugggcgugagaaagaccggccagaucuggcccaacgacggcgagggcgccuuccacggcgacgccgacggcagcuucggcaccccccccggcuacugcugccugugccugcccgccuggcccagcggcugcaccgccgccaccgccagagugaccagaagcuga

SEQ ID NO: 2550 - RNA, 1365 nt, Artificial Sequence
  ABX82710 variant
augguggaccccgugggcuucgccgaggccuggaaggcccaguuccccgacagcgagccccccagaauggagcugagaagcgugggcgacaucgagcaggagcuggagagaugcaaggccagcaucagaagacuggagcaggaggugaaccaggagagauucagaaugaucuaccugcagacccugcuggccaaggagaagaagagcuacgacagacagagauggggcuucagaagagccgcccaggcccccgacggcgccagcgagcccagagccagcgccagcagaccccagcccgcccccgccgacggcgccgaccccccccccgccgaggagcccgaggccagacccgacggcgagggcagccccggcaaggccagacccggcaccgccagaagacccggcgccgccgccagcggcgagagagacgacagaggcccccccgccagcguggccgcccugagaagcaacuucgagagaaucagaaagggccacggccagcccggcgccgacgccgagaagcccuucuacgugaacguggaguuccaccacgagagaggccuggugaaggugaacgacaaggaggugagcgacagaaucagcagccugggcagccaggccaugcagauggagagaaagaagagccagcacggcgccggcagcagcgugggcgacgccagcagaccccccuacagaggcagaagcagcgagagcagcugcggcguggacggcgacuacgaggacgccgagcugaaccccagauuccugaaggacaaccugaucgacgccaacggcggcagcagaccccccuggcccccccuggaguaccagcccuaccagagcaucuacgugggcggcaugauggagggcgagggcaagggcccccugcugagaagccagagcaccagcgagcaggagaagagacugaccuggcccagaagaagcuacagccccagaagcuucgaggacugcggcggcggcuacacccccgacugcagcagcaacgagaaccugaccagcagcgaggaggacuucagcagcggccagagcagcagagugagccccagccccaccaccuacagaauguucagagacaagagcagaagccccagccagaacagccagcagagcuucgacagcagcagcccccccaccccccagugccacaagagacacagacacugccccgugguggugagcgaggccaccaucgugggcgugagaaagaccggccagaucuggcccaacgacggcgagggcgccuuccacggcgacgccgacggcagcuucggcaccccccccggcuacggcugcgccgccggcagacccccccaccugaccgagcugcccgugcagcaccaguga

SEQ ID NO: 2551 - RNA, 1404 nt, Artificial Sequence
  ABX82711 variant
augguggaccccgugggcuucgccgaggccuggaaggcccaguuccccgacagcgagccccccagaauggagcugagaagcgugggcgacaucgagcaggagcuggagagaugcaaggccagcaucagaagacuggagcaggaggugaaccaggagagauucagaaugaucuaccugcagacccugcuggccaaggagaagaagagcuacgacagacagagauggggcuucagaagagccgcccaggcccccgacggcgccagcgagcccagagccagcgccagcagaccccagcccgcccccgccgacggcgccgaccccccccccgccgaggagcccgaggccagacccgacggcgagggcagccccggcaaggccagacccggcaccgccagaagacccggcgccgccgccagcggcgagagagacgacagaggcccccccgccagcguggccgcccugagaagcaacuucgagagaaucagaaagggccacggccagcccggcgccgacgccgagaagcccuucuacgugaacguggaguuccaccacgagagaggccuggugaaggugaacgacaaggaggugagcgacagaaucagcagccugggcagccaggccaugcagauggagagaaagaagagccagcacggcgccggcagcagcgugggcgacgccagcagaccccccuacagaggcagaagcagcgagagcagcugcggcguggacggcgacuacgaggacgccgagcugaaccccagauuccugaaggacaaccugaucgacgccaacggcggcagcagaccccccuggcccccccuggaguaccagcccuaccagagcaucuacgugggcggcaugauggagggcgagggcaagggcccccugcugagaagccagagcaccagcgagcaggagaagagacugaccuggcccagaagaagcuacagccccagaagcuucgaggacugcggcggcggcuacacccccgacugcagcagcaacgagaaccugaccagcagcgaggaggacuucagcagcggccagagcagcagagugagccccagccccaccaccuacagaauguucagagacaagagcagaagccccagccagaacagccagcagagcuucgacagcagcagcccccccaccccccagugccacaagagacacagacacugccccgugguggugagcgaggccaccaucgugggcgugagaaagaccggccagaucuggcccaacgacggcgagggcgccuuccacggcgacgccgugcugaagaccgaggugccccaccagggcgugagaagagccagacugagccuggaggcccugggcgaggaccccagcuuccuguuccccgccagcgacggccccagacacagcagcaccugguga

SEQ ID NO: 2552 - RNA, 1542 nt, Artificial Sequence
  ABX82712 variant
augguggaccccgugggcuucgccgaggccuggaaggcccaguuccccgacagcgagccccccagaauggagcugagaagcgugggcgacaucgagcaggagcuggagagaugcaaggccagcaucagaagacuggagcaggaggugaaccaggagagauucagaaugaucuaccugcagacccugcuggccaaggagaagaagagcuacgacagacagagauggggcuucagaagagccgcccaggcccccgacggcgccagcgagcccagagccagcgccagcagaccccagcccgcccccgccgacggcgccgaccccccccccgccgaggagcccgaggccagacccgacggcgagggcagccccggcaaggccagacccggcaccgccagaagacccggcgccgccgccagcggcgagagagacgacagaggcccccccgccagcguggccgcccugagaagcaacuucgagagaaucagaaagggccacggccagcccggcgccgacgccgagaagcccuucuacgugaacguggaguuccaccacgagagaggccuggugaaggugaacgacaaggaggugagcgacagaaucagcagccugggcagccaggccaugcagauggagagaaagaagagccagcacggcgccggcagcagcgugggcgacgccagcagaccccccuacagaggcagaagcagcgagagcagcugcggcguggacggcgacuacgaggacgccgagcugaaccccagauuccugaaggacaaccugaucgacgccaacggcggcagcagaccccccuggcccccccuggaguaccagcccuaccagagcaucuacgugggcggcaugauggagggcgagggcaagggcccccugcugagaagccagagcaccagcgagcaggagaagagacugaccuggcccagaagaagcuacagccccagaagcuucgaggacugcggcggcggcuacacccccgacugcagcagcaacgagaaccugaccagcagcgaggaggacuucagcagcggccagagcagcagagugagccccagccccaccaccuacagaauguucagagacaagagcagaagccccagccagaacagccagcagagcuucgacagcagcagcccccccaccccccagugccacaagagacacagacacugccccgugguggugagcgaggccaccaucgugggcgugagaaagaccggccagaucuggcccaacgacggcgagggcgccuuccacggcgacgccgacggcagcuucggcaccccccccggcuacggcugcgccgccgacagagccgaggagcagagaagacaccaggacggccugcccuacaucgacgacagccccagcagcagcccccaccugagcagcaagggcagaggcagcagagacgcccuggugagcggcgcccuggagagcaccaaggccagcgagcuggaccccgugaagaugacccccaccuucagccugcacugcaugauccuguggcccguggagaucacccuguga

SEQ ID NO: 2553 - RNA, 1221 nt, Artificial Sequence
  ABX82714 variant
augguggaccccgugggcuucgccgaggccuggaaggcccaguuccccgacagcgagccccccagaauggagcugagaagcgugggcgacaucgagcaggagcuggagagaugcaaggccagcaucagaagacuggagcaggaggugaaccaggagagauucagaaugaucuaccugcagacccugcuggccaaggagaagaagagcuacgacagacagagauggggcuucagaagagccgcccaggcccccgacggcgccagcgagcccagagccagcgccagcagaccccagcccgcccccgccgacggcgccgaccccccccccgccgaggagcccgaggccagacccgacggcgagggcagccccggcaaggccagacccggcaccgccagaagacccggcgccgccgccagcggcgagagagacgacagaggcccccccgccagcguggccgcccugagaagcaacuucgagagaaucagaaagggccacggccagcccggcgccgacgccgagaagcccuucuacgugaacguggaguuccaccacgagagaggccuggugaaggugaacgacaaggaggugagcgacagaaucagcagccugggcagccaggccaugcagauggagagaaagaagagccagcacggcgccggcagcagcgugggcgacgccagcagaccccccuacagaggcagaagcagcgagagcagcugcggcguggacggcgacuacgaggacgccgagcugaaccccagauuccugaaggacaaccugaucgacgccaacggcggcagcagaccccccuggcccccccuggaguaccagcccuaccagagcaucuacgugggcggcaugauggagggcgagggcaagggcccccugcugagaagccagagcaccagcgagcaggagaagagacugaccuggcccagaagaagcuacagccccagaagcuucgaggacugcggcggcggcuacacccccgacugcagcagcaacgagaaccugaccagcagcgaggaggacuucagcagcggccagagcagcagagugagccccagccccaccaccuacagaauguucagagacaagagcagaagccccagccagaacagccagcagagcuucgacagcagcagcccccccaccccccagugccacaagagacacagacacugccccgugguggugagcgaggccaccagcggccaguga

SEQ ID NO: 2554 - RNA, 2346 nt, Artificial Sequence
  AAH58926 variant
auggccacccaggccgaccugauggagcuggacauggccauggagcccgacagaaaggccgccgugagccacuggcagcagcagagcuaccuggacagcggcauccacagcggcgccaccaccaccgcccccagccugagcggcaagggcaaccccgaggaggaggacguggacaccagccaggugcuguacgagugggagcagggcuucagccagagcuucacccaggagcagguggccgacaucgacggccaguacgccaugaccagagcccagagagugagagccgccauguuccccgagacccuggacgagggcaugcagauccccagcacccaguucgacgccgcccaccccaccaacgugcagagacuggccgagcccagccagaugcugaagcacgccguggugaaccugaucaacuaccaggacgacgccgagcuggccaccagagccauccccgagcugaccaagcugcugaacgacgaggaccaggugguggugaacaaggccgccgugauggugcaccagcugagcaagaaggaggccagcagacacgccaucaugagaagcccccagauggugagcgccaucgugagaaccaugcagaacaccaacgacguggagaccgccagaugcaccgccggcacccugcacaaccugagccaccacagagagggccugcuggccaucuucaagagcggcggcauccccgcccuggugaagaugcugggcagccccguggacagcgugcuguucuacgccaucaccacccugcacaaccugcugcugcaccaggagggcgccaagauggccgugagacuggccggcggccugcagaagaugguggcccugcugaacaagaccaacgugaaguuccuggccaucaccaccgacugccugcagauccuggccuacggcaaccaggagagcaagcugaucauccuggccagcggcggcccccaggcccuggugaacaucaugagaaccuacaccuacgagaagcugcuguggaccaccagcagagugcugaaggugcugagcgugugcagcagcaacaagcccgccaucguggaggccggcggcaugcaggcccugggccugcaccugaccgaccccagccagagacuggugcagaacugccuguggacccugagaaaccugagcgacgccgccaccaagcaggagggcauggagggccugcugggcacccuggugcagcugcugggcagcgacgacaucaacguggugaccugcgccgccggcauccugagcaaccugaccugcaacaacuacaagaacaagaugauggugugccaggugggcggcaucgaggcccuggugagaaccgugcugagagccggcgacagagaggacaucaccgagcccgccaucugcgcccugagacaccugaccagcagacaccaggaggccgagauggcccagaacgccgugagacugcacuacggccugcccgugguggugaagcugcugcacccccccagccacuggccccugaucaaggccaccgugggccugaucagaaaccuggcccugugccccgccaaccacgccccccugagagagcagggcgccauccccagacuggugcagcugcuggugagagcccaccaggacacccagagaagaaccagcaugggcggcacccagcagcaguucguggagggcgugagaauggaggagaucguggagggcugcaccggcgcccugcacauccuggccagagacgugcacaacagaaucgugaucagaggccugaacaccaucccccuguucgugcagcugcuguacagccccaucgagaacauccagagaguggccgccggcgugcugugcgagcuggcccaggacaaggaggccgccgaggccaucgaggccgagggcgccaccgccccccugaccgagcugcugcacagcagaaacgagggcguggccaccuacgccgccgccgugcuguucagaaugagcgaggacaagccccaggacuacaagaagagacugagcguggagcugaccagcagccuguucagaaccgagcccauggccuggaacgagaccgccgaccugggccuggacaucggcgcccagggcgagccccugggcuacagacaggacgaccccagcuacagaagcuuccacagcggcggcuacggccaggacgcccugggcauggaccccaugauggagcacgagaugggcggccaccaccccggcgccgacuaccccguggacggccugcccgaccugggccacgcccaggaccugauggacggccugccccccggcgacagcaaccagcuggccugguucgacaccgaccuguga

SEQ ID NO: 2555 - RNA, 1692 nt, Artificial Sequence
  AAI21007 variant
auggacgugggcgagcugcugagcuaccagcccaacagaggcaccaagagacccagagacgacgaggaggaggagcagaagaugagaagaaagcagaccggcaccagagagagaggcagauacagagaggaggagaugaccgugguggaggaggccgacgacgacaagaagagacugcugcagaucaucgacagagacggcgaggaggaggaggaggaggaggagccccuggacgagagcagcgugaagaagaugauccugaccuucgagaagagaagcuacaagaaccaggagcugagaaucaaguuccccgacaaccccgagaaguucauggagagcgagcuggaccugaacgacaucauccaggagaugcacgugguggccaccaugcccgaccuguaccaccugcugguggagcugaacgccgugcagagccugcugggccugcugggccacgacaacaccgacgugagcaucgccgugguggaccugcugcaggagcugaccgacaucgacacccugcacgagagcgaggagggcgccgaggugcugaucgacgcccugguggacggccaggugguggcccugcuggugcagaaccuggagagacuggacgagagcgugaaggaggaggccgacggcgugcacaacacccuggccaucguggagaacauggccgaguucagacccgagaugugcaccgagggcgcccagcagggccugcugcaguggcugcugaagagacugaaggccaagaugcccuucgacgccaacaagcuguacugcagcgaggugcuggccauccugcugcaggacaacgacgagaacagagagcugcugggcgagcuggacggcaucgacgugcugcugcagcagcugagcguguucaagagacacaaccccagcaccgccgaggagcaggagaugauggagaaccuguucgacagccugugcagcugccugaugcugagcagcaacagagagagauuccugaagggcgagggccugcagcugaugaaccugaugcugagagagaagaagaucagcagaagcagcgcccugaaggugcuggaccacgccaugaucggccccgagggcaccgacaacugccacaaguucguggacauccugggccugagaaccaucuucccccuguucaugaagagccccagaaagaucaagaaggugggcaccaccgagaaggagcacgaggagcacgugugcagcauccuggccagccugcugagaaaccugagaggccagcagagaaccagacugcugaacaaguucaccgagaacgacagcgagaagguggacagacugauggagcugcacuucaaguaccugggcgccaugcagguggccgacaagaagaucgagggcgagaagcacgacauggugagaagaggcgagaucaucgacaacgacaccgaggaggaguucuaccugagaagacuggacgccggccuguucgugcugcagcacaucugcuacaucauggccgagaucugcaacgccaacgugccccagaucagacagagagugcaccagauccugaacaugagaggcagcagcaucaagaucgugagacacaucaucaaggaguacgccgagaacaucggcgacggcagaagccccgaguucagagagaacgagcagaagagaauccugggccugcuggagaacuucuga

SEQ ID NO: 2556 - RNA, 1833 nt, Artificial Sequence
  CCDS4772.1 variant
auggagaccgcccccaagcccggcaaggacgugccccccaagaaggacaagcugcagaccaagagaaagaagcccagaagauacugggaggaggagaccgugcccaccaccgccggcgccagccccggcccccccagaaacaagaagaacagagagcugagaccccagagacccaagaacgccuacauccugaagaagagcagaaucagcaagaagccccaggugcccaagaagcccagagaguggaagaaccccgagagccagagaggccugagcggcacccaggaccccuuccccggccccgcccccgugcccguggagguggugcagaaguucugcagaaucgacaagagcagaaagcugccccacagcaaggccaagaccagaagcagacuggagguggccgaggccgaggaggaggagaccagcaucaaggccgccagaagcgagcugcugcuggccgaggagcccggcuuccuggagggcgaggacggcgaggacaccgccaagaucugccaggccgacaucguggaggccguggacaucgccagcgccgccaagcacuucgaccugaaccugagacaguucggccccuacagacugaacuacagcagaaccggcagacaccuggccuucggcggcagaagaggccacguggccgcccuggacugggugaccaagaagcugaugugcgagaucaacgugauggaggccgugagagacaucagauuccugcacagcgaggcccugcuggccguggcccagaacagauggcugcacaucuacgacaaccagggcaucgagcugcacugcaucagaagaugcgacagagugaccagacuggaguuccugcccuuccacuuccugcuggccaccgccagcgagaccggcuuccugaccuaccuggacgugagcgugggcaagaucguggccgcccugaacgccagagccggcagacuggacgugaugagccagaaccccuacaacgccgugauccaccugggccacagcaacggcaccgugagccuguggagccccgccaugaaggagccccuggccaagauccugugccacagaggcggcgugagagccguggccguggacagcaccggcaccuacauggccaccagcggccuggaccaccagcugaagaucuucgaccugagaggcaccuaccagccccugagcaccagaacccugccccacggcgccggccaccuggccuucagccagagaggccugcugguggccggcaugggcgacguggugaacaucugggccggccagggcaaggccagcccccccagccuggagcagcccuaccugacccacagacugagcggccccgugcacggccugcaguucugccccuucgaggacgugcugggcgugggccacaccggcggcaucaccagcaugcuggugcccggcgccggcgagcccaacuucgacggccuggagagcaaccccuacagaagcagaaagcagagacaggagugggaggugaaggcccugcuggagaaggugcccgccgagcugaucugccuggaccccagagcccuggccgagguggacgugaucagccuggagcagggcaagaaggagcagaucgagagacugggcuacgacccccaggccaaggcccccuuccagcccaagcccaagcagaagggcagaagcagcaccgccagccuggugaagagaaagagaaaggugauggacgaggagcacagagacaaggugagacagagccugcagcagcagcaccacaaggaggccaaggccaagcccaccggcgccagacccagcgcccuggacagauucgugagauga

SEQ ID NO: 2557 - RNA, 897 nt, Artificial Sequence
  AAG37878 variant
augggccccaaggacagcgccaagugccugcacagaggcccccagcccagccacugggccgccggcgacggccccacccaggagagaugcggccccagaagccugggcagccccgugcugggccuggacaccugcagagccugggaccacguggacggccagauccugggccagcugagaccccugaccgaggaggaggaggaggagggcgccggcgccacccugagcagaggccccgccuuccccggcaugggcagcgaggagcugagacuggccagcuucuacgacuggccccugaccgccgaggugccccccgagcugcuggccgccgccggcuucuuccacaccggccaccaggacaaggugagaugcuucuucugcuacggcggccugcagagcuggaagagaggcgacgaccccuggaccgagcacgccaagugguuccccagcugccaguuccugcugagaagcaagggcagagacuucgugcacagcgugcaggagacccacagccagcugcugggcagcugggaccccugggaggagcccgaggacgccgcccccguggcccccagcgugcccgccagcggcuaccccgagcugcccacccccagaagagaggugcagagcgagagcgcccaggagcccggcggcgugagccccgccgaggcccagagagccuggugggugcuggagccccccggcgccagagacguggaggcccagcugagaagacugcaggaggagagaaccugcaaggugugccuggacagagccgugagcaucguguucgugcccugcggccaccuggugugcgccgagugcgcccccggccugcagcugugccccaucugcagagcccccgugagaagcagagugagaaccuuccugagcuga

SEQ ID NO: 2558 - RNA, 2280 nt, Artificial Sequence
  EAW60925 variant
auggaccugagcgcccugagaguggaggaggugcagaacgugaucaacgccaugcagaagauccuggagugccccaucugccuggagcugaucaaggagcccgugagcaccaagugcgaccacaucuucugcaaguucugcaugcugaagcugcugaaccagaagaagggccccagccagugcccccugugcaagaacgacaucaccaagagaagccugcaggagagcaccagauucagccagcugguggaggagcugcugaagaucaucugcgccuuccagcuggacaccggccuggaguacgccaacagcuacaacuucgccaagaaggagaacaacagccccgagcaccugaaggacgaggugagcaucauccagagcaugggcuacagaaacagagccaagagacugcugcagagcgagcccgagaaccccagccugcaggagaccagccugagcgugcagcugagcaaccugggcaccgugagaacccugagaaccaagcagagaauccagccccagaagaccagcguguacaucgagcugggcagcgacagcagcgaggacaccgugaacaaggccaccuacugcagcgugggcgaccaggagcugcugcagaucaccccccagggcaccagagacgagaucagccuggacagcgccaagaaggccgccugcgaguucagcgagaccgacgugaccaacaccgagcaccaccagcccagcaacaacgaccugaacaccaccgagaagagagccgccgagagacaccccgagaaguaccagggcgaggccgccagcggcugcgagagcgagaccagcgugagcgaggacugcagcggccugagcagccagagcgacauccugaccacccagcagagagacaccaugcagcacaaccugaucaagcugcagcaggagauggccgagcuggaggccgugcuggagcagcacggcagccagcccagcaacagcuaccccagcaucaucagcgacagcagcgcccuggaggaccugagaaaccccgagcagagcaccagcgagaaggugcugaccagccagaagagcagcgaguaccccaucagccagaaccccgagggccugagcgccgacaaguucgaggugagcgccgacagcagcaccagcaagaacaaggagcccggcguggagagaagcagccccagcaagugccccagccuggacgacagaugguacaugcacagcugcagcggcagccugcagaacagaaacuaccccagccaggaggagcugaucaaggugguggacguggaggagcagcagcuggaggagagcggcccccacgaccugaccgagaccagcuaccugcccagacaggaccuggagggcacccccuaccuggagagcggcaucagccuguucagcgacgaccccgagagcgaccccagcgaggacagagcccccgagagcgccagagugggcaacauccccagcagcaccagcgcccugaaggugccccagcugaagguggccgagagcgcccagagccccgccgccgcccacaccaccgacaccgccggcuacaacgccauggaggagagcgugagcagagagaagcccgagcugaccgccagcaccgagagagugaacaagagaaugagcaugguggugagcggccugacccccgaggaguucaugcugguguacaaguucgccagaaagcaccacaucacccugaccaaccugaucaccgaggagaccacccacguggugaugaagaccgacgccgaguucgugugcgagagaacccugaaguacuuccugggcaucgccggcggcaaguggguggugagcuacuucugggugacccagagcaucaaggagagaaagaugcugaacgagcacgacuucgaggugagaggcgacguggugaacggcagaaaccaccagggccccaagagagccagagagagccaggacagaaagaucuucagaggccuggagaucugcugcuacggccccuucaccaacaugcccaccgaccagcuggaguggauggugcagcugugcggcgccagcguggugaaggagcugagcagcuucacccugggcaccggcgugcaccccaucgugguggugcagcccgacgccuggaccgaggacaacggcuuccacgccaucggccagaugugcgaggcccccguggugaccagagagugggugcuggacagcguggcccuguaccagugccaggagcuggacaccuaccugaucccccagaucccccacagccacuacuga

SEQ ID NO: 2559 - RNA, 2160 nt, Artificial Sequence
  EAW60922 variant
auggaccugagcgcccugagaguggaggaggugcagaacgugaucaacgccaugcagaagauccuggagugccccaucugccuggagcugaucaaggagcccgugagcaccaagugcgaccacaucuucugcaaguucugcaugcugaagcugcugaaccagaagaagggccccagccagugcccccugugcaagaacgacaucaccaagagaagccugcaggagagcaccagauucagccagcugguggaggagcugcugaagaucaucugcgccuuccagcuggacaccggccuggaguacgccaacagcuacaacuucgccaagaaggagaacaacagccccgagcaccugaaggacgaggugagcaucauccagagcaugggcuacagaaacagagccaagagacugcugcagagcgagcccgagaaccccagccugcaggagaccagccugagcgugcagcugagcaaccugggcaccgugagaacccugagaaccaagcagagaauccagccccagaagaccagcguguacaucgagcuggccgccugcgaguucagcgagaccgacgugaccaacaccgagcaccaccagcccagcaacaacgaccugaacaccaccgagaagagagccgccgagagacaccccgagaaguaccagggcgaggccgccagcggcugcgagagcgagaccagcgugagcgaggacugcagcggccugagcagccagagcgacauccugaccacccagcagagagacaccaugcagcacaaccugaucaagcugcagcaggagauggccgagcuggaggccgugcuggagcagcacggcagccagcccagcaacagcuaccccagcaucaucagcgacagcagcgcccuggaggaccugagaaaccccgagcagagcaccagcgagaaggccgugcugaccagccagaagagcagcgaguaccccaucagccagaaccccgagggccugagcgccgacaaguucgaggugagcgccgacagcagcaccagcaagaacaaggagcccggcguggagagaagcagccccagcaagugccccagccuggacgacagaugguacaugcacagcugcagcggcagccugcagaacagaaacuaccccagccaggaggagcugaucaaggugguggacguggaggagcagcagcuggaggagagcggcccccacgaccugaccgagaccagcuaccugcccagacaggaccuggagggcacccccuaccuggagagcggcaucagccuguucagcgacgaccccgagagcgaccccagcgaggacagagcccccgagagcgccagagugggcaacauccccagcagcaccagcgcccugaaggugccccagcugaagguggccgagagcgcccagagccccgccgccgcccacaccaccgacaccgccggcuacaacgccauggaggagagcgugagcagagagaagcccgagcugaccgccagcaccgagagagugaacaagagaaugagcaugguggugagcggccugacccccgaggaguucaugcugguguacaaguucgccagaaagcaccacaucacccugaccaaccugaucaccgaggagaccacccacguggugaugaagaccgacgccgaguucgugugcgagagaacccugaaguacuuccugggcaucgccggcggcaaguggguggugagcuacuucugggugacccagagcaucaaggagagaaagaugcugaacgagcacgacuucgaggugagaggcgacguggugaacggcagaaaccaccagggccccaagagagccagagagagccaggacagaaagaucuucagaggccuggagaucugcugcuacggccccuucaccaacaugcccaccgaccagcuggaguggauggugcagcugugcggcgccagcguggugaaggagcugagcagcuucacccugggcaccggcgugcaccccaucgugguggugcagcccgacgccuggaccgaggacaacggcuuccacgccaucggccagaugugcgaggcccccguggugaccagagagugggugcuggacagcguggcccuguaccagugccaggagcuggacaccuaccugaucccccagaucccccacagccacuacuga

SEQ ID NO: 2560 - RNA, 2166 nt, Artificial Sequence
  EAW60923 variant
auggaccugagcgcccugagaguggaggaggugcagaacgugaucaacgccaugcagaagauccuggagugccccaucugccuggagcugaucaaggagcccgugagcaccaagugcgaccacaucuucugcaaguucugcaugcugaagcugcugaaccagaagaagggccccagccagugcccccugugcaagaacgacaucaccaagagaagccugcaggagagcaccagauucagccagcugguggaggagcugcugaagaucaucugcgccuuccagcuggacaccggccuggaguacgccaacagcuacaacuucgccaagaaggagaacaacagccccgagcaccugaaggacgaggugagcaucauccagagcaugggcuacagaaacagagccaagagacugcugcagagcgagcccgagaaccccagccugcaggagaccagccugagcgugcagcugagcaaccugggcaccgugagaacccugagaaccaagcagagaauccagccccagaagaccagcguguacaucgagcugggcagcgacagcagcgaggacaccgugaacaaggccaccuacugcagcgugggcgaccaggagcugcugcagaucaccccccagggcaccagagacgagaucagccuggacagcgccaagaagggcgaggccgccagcggcugcgagagcgagaccagcgugagcgaggacugcagcggccugagcagccagagcgacauccugaccacccagcagagagacaccaugcagcacaaccugaucaagcugcagcaggagauggccgagcuggaggccgugcuggagcagcacggcagccagcccagcaacagcuaccccagcaucaucagcgacagcagcgcccuggaggaccugagaaaccccgagcagagcaccagcgagaaggccgugcugaccagccagaagagcagcgaguaccccaucagccagaaccccgagggccugagcgccgacaaguucgaggugagcgccgacagcagcaccagcaagaacaaggagcccggcguggagagaagcagccccagcaagugccccagccuggacgacagaugguacaugcacagcugcagcggcagccugcagaacagaaacuaccccagccaggaggagcugaucaaggugguggacguggaggagcagcagcuggaggagagcggcccccacgaccugaccgagaccagcuaccugcccagacaggaccuggagggcacccccuaccuggagagcggcaucagccuguucagcgacgaccccgagagcgaccccagcgaggacagagcccccgagagcgccagagugggcaacauccccagcagcaccagcgcccugaaggugccccagcugaagguggccgagagcgcccagagccccgccgccgcccacaccaccgacaccgccggcuacaacgccauggaggagagcgugagcagagagaagcccgagcugaccgccagcaccgagagagugaacaagagaaugagcaugguggugagcggccugacccccgaggaguucaugcugguguacaaguucgccagaaagcaccacaucacccugaccaaccugaucaccgaggagaccacccacguggugaugaagaccgacgccgaguucgugugcgagagaacccugaaguacuuccugggcaucgccggcggcaaguggguggugagcuacuucugggugacccagagcaucaaggagagaaagaugcugaacgagcacgacuucgaggugagaggcgacguggugaacggcagaaaccaccagggccccaagagagccagagagagccaggacagaaagaucuucagaggccuggagaucugcugcuacggccccuucaccaacaugcccaccgaccagcuggaguggauggugcagcugugcggcgccagcguggugaaggagcugagcagcuucacccugggcaccggcgugcaccccaucgugguggugcagcccgacgccuggaccgaggacaacggcuuccacgccaucggccagaugugcgaggcccccguggugaccagagagugggugcuggacagcguggcccuguaccagugccaggagcuggacaccuaccugaucccccagaucccccacagccacuacuga

SEQ ID NO: 2561 - RNA, 36 nt, Artificial Sequence
  AIC83575 variant
auggaccugagcgcccugagaguggaggagguguga

SEQ ID NO: 2562 - RNA, 522 nt, Artificial Sequence
  ABC59810 variant
auggacgccgaguucgugugcgagagaacccugaaguacuuccugggcaucgccggcggcaaguggguggugagcuacuucugggugacccagagcaucaaggagagaaagaugcugaacgagcacgacuucgaggugagaggcgacguggugaacggcagaaaccaccagggccccaagagagccagagagagccaggacagaaagaucuucagaggccuggagaucugcugcuacggccccuucaccaacaugcccaccgaccagcuggaguggauggugcagcugugcggcgccagcguggugaaggagcugagcagcuucacccugggcaccggcgugcaccccaucgugguggugcagcccgacgccuggaccgaggacaacggcuuccacgccaucggccagaugugcgaggcccccguggugaccagagagugggugcuggacagcguggcccuguaccagugccaggagcuggacaccuaccugaucccccagaucccccacagccacuacuga

SEQ ID NO: 2563 - RNA, 1065 nt, Artificial Sequence
  ABC88652 variant
augcacagcugcagcggcagccugcagaacagaaacuaccccagccaggaggagcugaucaaggugguggacguggaggagcagcagcuggaggagagcggcccccacgaccugaccgagaccagcuaccugcccagacaggaccuggagggcacccccuaccuggagagcggcaucagccuguucagcgacgaccccgagagcgaccccagcgaggacagagcccccgagagcgccagagugggcaacauccccagcagcaccagcgcccugaaggugccccagcugaagguggccgagagcgcccagggccccgccgccgcccacaccaccgacaccgccggcuacaacgccauggaggagagcgugagcagagagaagcccgagcugaccgccagcaccgagagagugaacaagagaaugagcaugguggugagcggccugacccccgaggaguucaugcugguguacaaguucgccagaaagcaccacaucacccugaccaaccugaucaccgaggagaccacccacguggugaugaagaccgacgccgaguucgugugcgagagaacccugaaguacuuccugggcaucgccggcggcaaguggguggugagcuacuucugggugacccagagcaucaaggagagaaagaugcugaacgagcacgacuucgaggugagaggcgacguggugaacggcagaaaccaccagggccccaagagagccagagagagccaggacagaaagaucuucagaggccuggagaucugcugcuacggccccuucaccaacaugcccaccgaccagcuggaguggauggugcagcugugcggcgccagcguggugaaggagcugagcagcuucacccugggcaccggcgugcaccccaucgugguggugcagcccgacgccuggaccgaggacaacggcuuccacgccaucggccagaugugcgagacccccguggugaccagagagugggugcuggacagcguggcccuguaccagugccaggagcuggacaccuaccugaucccccagaucccccacagccacuacuga

SEQ ID NO: 2564 - RNA, 2043 nt, Artificial Sequence
  EAW60939 variant
auggaccugagcgcccugagaguggaggaggugcagaacgugaucaacgccaugcagaagauccuggagugccccaucugccuggagcugaucaaggagcccgugagcaccaagugcgaccacaucuucugcaaguucugcaugcugaagcugcugaaccagaagaagggccccagccagugcccccugugcaagaacgacaucaccaagagaagccugcaggagagcaccagauucagccagcugguggaggagcugcugaagaucaucugcgccuuccagcuggacaccggccuggaguacgccaacagcuacaacuucgccaagaaggagaacaacagccccgagcaccugaaggacgaggugagcaucauccagagcaugggcuacagaaacagagccaagagacugcugcagagcgagcccgagaaccccagccugcaggagaccagccugagcgugcagcugagcaaccugggcaccgugagaacccugagaaccaagcagagaauccagccccagaagaccagcguguacaucgagcugggcgaggccgccagcggcugcgagagcgagaccagcgugagcgaggacugcagcggccugagcagccagagcgacauccugaccacccagcagagagacaccaugcagcacaaccugaucaagcugcagcaggagauggccgagcuggaggccgugcuggagcagcacggcagccagcccagcaacagcuaccccagcaucaucagcgacagcagcgcccuggaggaccugagaaaccccgagcagagcaccagcgagaaggccgugcugaccagccagaagagcagcgaguaccccaucagccagaaccccgagggccugagcgccgacaaguucgaggugagcgccgacagcagcaccagcaagaacaaggagcccggcguggagagaagcagccccagcaagugccccagccuggacgacagaugguacaugcacagcugcagcggcagccugcagaacagaaacuaccccagccaggaggagcugaucaaggugguggacguggaggagcagcagcuggaggagagcggcccccacgaccugaccgagaccagcuaccugcccagacaggaccuggagggcacccccuaccuggagagcggcaucagccuguucagcgacgaccccgagagcgaccccagcgaggacagagcccccgagagcgccagagugggcaacauccccagcagcaccagcgcccugaaggugccccagcugaagguggccgagagcgcccagagccccgccgccgcccacaccaccgacaccgccggcuacaacgccauggaggagagcgugagcagagagaagcccgagcugaccgccagcaccgagagagugaacaagagaaugagcaugguggugagcggccugacccccgaggaguucaugcugguguacaaguucgccagaaagcaccacaucacccugaccaaccugaucaccgaggagaccacccacguggugaugaagaccgacgccgaguucgugugcgagagaacccugaaguacuuccugggcaucgccggcggcaaguggguggugagcuacuucugggugacccagagcaucaaggagagaaagaugcugaacgagcacgacuucgaggugagaggcgacguggugaacggcagaaaccaccagggccccaagagagccagagagagccaggacagaaagaucuucagaggccuggagaucugcugcuacggccccuucaccaacaugcccaccgaccagcuggaguggauggugcagcugugcggcgccagcguggugaaggagcugagcagcuucacccugggcaccggcgugcaccccaucgugguggugcagcccgacgccuggaccgaggacaacggcuuccacgccaucggccagaugugcgaggcccccguggugaccagagagugggugcuggacagcguggcccuguaccagugccaggagcuggacaccuaccugaucccccagaucccccacagccacuacuga

SEQ ID NO: 2565 - RNA, 546 nt, Artificial Sequence
  AAC72302 variant
augcugcuggagcccggcagaggcugcugcgcccuggccauccugcuggccaucguggacauccagagcggcggcugcaucaacaucaccagcagcgccagccaggagggcaccagacugaaccugaucugcaccguguggcacaagaaggaggaggccgagggcuucgugguguuccugugcaaggacagaagcggcgacugcagccccgagaccagccugaagcagcugagacugaagagagaccccggcaucgacggcgugggcgagaucagcagccagcugauguucaccaucagccaggugaccccccugcacagcggcaccuaccagugcugcgccagaagccagaagagcggcaucagacugcagggccacuucuucagcauccuguucaccgagaccggcaacuacaccgugaccggccugaagcagagacagcaccuggaguucagccacaacgagggcacccugagcagcggcuuccugcaggagaaggugugggugaugcuggugaccagccugguggcccugcaggcccuguga

SEQ ID NO: 2566 - RNA, 639 nt, Artificial Sequence
  BAG58223 variant
augcugcugagcguguacuucaaggagcaguuccuggacggcgacggcuggaccagcagauggaucgagagcaagcacaagagcgacuucggcaaguucgugcugagcagcggcaaguucuacggcgacgaggagaaggacaagggccugcagaccagccaggacgccagauucuacgcccugagcgccagcuucgagcccuucagcaacaagggccagacccugguggugcaguucaccgugaagcacgagcagaacaucgacugcggcggcggcuacgugaagcuguuccccaacagccuggaccagaccgacaugcacggcgacagcgaguacaacaucauguucggccccgacaucugcggccccggcaccaagaaggugcacgugaucuucaacuacaagggcaagaacgugcugaucaacaaggacaucagaugcaaggacgacgaguucacccaccuguacacccugaucgugagacccgacaacaccuacgaggugaagaucgacaacagccagguggagagcggcagccuggaggacgacugggacuuccugccccccaagaagaucaaggaccccgacgccagcaagcccgaggacugggacgagagagccaagaucgacgaccccuga

SEQ ID NO: 2567 - RNA, 891 nt, Artificial Sequence
  BAG65301 variant
augcacggcgacagcgaguacaacaucauguucggccccgacaucugcggccccggcaccaagaaggugcacgugaucuucaacuacaagggcaagaacgugcugaucaacaaggacaucagaugcaaggacgacgaguucacccaccuguacacccugaucgugagacccgacaacaccuacgaggugaagaucgacaacagccagguggagagcggcagccuggaggacgacugggacuuccugccccccaagaagaucaaggaccccgacgccagcaagcccgaggacugggacgagagagccaagaucgacgaccccaccgacagcaagcccgaggacugggacaagcccgagcacauccccgaccccgacgccaagaagcccgaggacugggacgaggagauggacggcgagugggagccccccgugauccagaaccccgaguacaagggcgaguggaagcccagacagaucgacaaccccgacuacaagggcaccuggauccaccccgagaucgacaaccccgaguacagccccgaccccagcaucuacgccuacgacaacuucggcgugcugggccuggaccuguggcaggugaagagcggcaccaucuucgacaacuuccugaucaccaacgacgaggccuacgccgaggaguucggcaacgagaccuggggcgugaccaaggccgccgagaagcagaugaaggacaagcaggacgaggagcagagacugaaggaggaggaggaggacaagaagagaaaggaggaggaggaggccgaggacaaggaggacgacgaggacaaggacgaggacgaggaggacgaggaggacaaggaggaggacgaggaggaggacgugcccggccaggccaaggacgagcuguga

SEQ ID NO: 2568 - RNA, 1254 nt, Artificial Sequence
  AAA36582 variant
augcugcugagcgugccccugcugcugggccugcugggccuggccguggccgagcccgccguguacuucaaggagcaguuccuggacggcgacggcuggaccagcagauggaucgagagcaagcacaagagcgacuucggcaaguucgugcugagcagcggcaaguucuacggcgacgaggagaaggacaagggccugcagaccagccaggacgccagauucuacgcccugagcgccagcuucgagcccuucagcaacaagggccagacccugguggugcaguucaccgugaagcacgagcagaacaucgacugcggcggcggcuacgugaagcuguuccccaacagccuggaccagaccgacaugcacggcgacagcgaguacaacaucauguucggccccgacaucugcggccccggcaccaagaaggugcacgugaucuucaacuacaagggcaagaacgugcugaucaacaaggacaucagaugcaaggacgacgaguucacccaccuguacacccugaucgugagacccgacaacaccuacgaggugaagaucgacaacagccagguggagagcggcagccuggaggacgacugggacuuccugccccccaagaagaucaaggaccccgacgccagcaagcccgaggacugggacgagagagccaagaucgacgaccccaccgacagcaagcccgaggacugggacaagcccgagcacauccccgaccccgacgccaagaagcccgaggacugggacgaggagauggacggcgagugggagccccccgugauccagaaccccgaguacaagggcgaguggaagcccagacagaucgacaaccccgacuacaagggcaccuggauccaccccgagaucgacaaccccgaguacagccccgaccccagcaucuacgccuacgacaacuucggcgugcugggccuggaccuguggcaggugaagagcggcaccaucuucgacaacuuccugaucaccaacgacgaggccuacgccgaggaguucggcaacgagaccuggggcgugaccaaggccgccgagaagcagaugaaggacaagcaggacgaggagcagagacugaaggaggaggaggaggacaagaagagaaaggaggaggaggaggccgaggacaaggaggacgacgaggacaaggacgaggacgaggaggacgaggaggacaaggaggaggacgaggaggaggacgugcccggccaggccaaggacgagcuguga

SEQ ID NO: 2569 - RNA, 1155 nt, Artificial Sequence
  BAB71655 variant
auggccagagcccuggugcagcugugggccaucugcaugcugagaguggcccuggccaccguguacuuccaggaggaguuccuggacggcgagcacuggagaaacagauggcugcagagcaccaacgacagcagauucggccacuucagacugagcagcggcaaguucuacggccacaaggagaaggacaagggccugcagaccacccagaacggcagauucuacgccaucagcgccagauucaagcccuucagcaacaagggcaagacccuggugauccaguacaccgugaagcacgagcagaagauggacugcggcggcggcuacaucaagguguuccccgccgacaucgaccagaagaaccugaacggcaagagccaguacuacaucauguucggccccgacaucugcggcuucgacaucaagaaggugcacgugauccugcacuucaagaacaaguaccacgagaacaagaagcugaucagaugcaagguggacggcuucacccaccuguacacccugauccugagacccgaccugagcuacgacgugaagaucgacggccagagcaucgagagcggcagcaucgaguacgacuggaaccugaccagccugaagaaggagaccagccccgccgagagcaaggacugggagcagaccaaggacaacaaggcccaggacugggagaagcacuuccuggacgccagcaccagcaagcagagcgacuggaacggcgaccuggacggcgacuggcccgcccccaugcugcagaagccccccuaccaggacggccugaagcccgagggcauccacaaggacguguggcugcacagaaagaugaagaacaccgacuaccugacccaguacgaccugagcgaguucgagaacaucggcgccaucggccuggagcuguggcaggugagaagcggcaccaucuucgacaacuuccugaucaccgacgacgaggaguacgccgacaacuucggcaaggccaccuggggcgagaccaagggccccgagagagagauggacgccauccaggccaaggaggagaugaagaaggccagagaggaggaggaggaggagcugcugagcggcaagaucaacagacacgagcacuacuucaaccaguuccacagaagaaacgagcuguga

SEQ ID NO: 2570 - RNA, 330 nt, Artificial Sequence
  CAA10193 variant
augcugauggcccaggaggcccuggccuuccugauggcccagggcgccaugcuggccgcccaggagagaagagugcccagagccgccgaggugcccggcgcccagggccagcagggccccagaggcagagaggaggcccccagaggcgugagaauggccgugccccugcugagaagaauggagggcgcccccgccggccccggcggcagaaccgccgccugcuucagcugcaccagcagaugccugagcagaagacccuggaagagaagcuggagcgccggcagcugccccggcaugccccaccugagccccgaccagggcagauucuga

SEQ ID NO: 2571 - RNA, 1440 nt, Artificial Sequence
  CAA66853 variant
auggacuucagcagaaaccuguacgacaucggcgagcagcuggacagcgaggaccuggccagccugaaguuccugagccuggacuacaucccccagagaaagcaggagcccaucaaggacgcccugaugcuguuccagagacugcaggagaagagaaugcuggaggagagcaaccugagcuuccugaaggagcugcuguucagaaucaacagacuggaccugcugaucaccuaccugaacaccagaaaggaggagauggagagagagcugcagacccccggcagagcccagaucagcgccuacagagugaugcuguaccagaucagcgaggaggugagcagaagcgagcugagaagcuucaaguuccugcugcaggaggagaucagcaagugcaagcuggacgacgacaugaaccugcuggacaucuucaucgagauggagaagagagugauccugggcgagggcaagcuggacauccugaagagagugugcgcccagaucaacaagagccugcugaagaucaucaacgacuacgaggaguucagcaaggagagaagcagcagccuggagggcagccccgacgaguucagcaacggcgaggagcugugcggcgugaugaccaucagcgacagccccagagagcaggacagcgagagccagacccuggacaagguguaccagaugaagagcaagcccagaggcuacugccugaucaucaacaaccacaacuucgccaaggccagagagaaggugcccaagcugcacagcaucagagacagaaacggcacccaccuggacgccggcgcccugaccaccaccuucgaggagcugcacuucgagaucaagccccacgacgacugcaccguggagcagaucuacgagauccugaagaucuaccagcugauggaccacagcaacauggacugcuucaucugcugcauccugagccacggcgacaagggcaucaucuacggcaccgacggccaggaggcccccaucuacgagcugaccagccaguucaccggccugaagugccccagccuggccggcaagcccaagguguucuucauccaggccugccagggcgacaacuaccagaagggcauccccguggagaccgacagcgaggagcagcccuaccuggagauggaccugagcagcccccagaccagauacauccccgacgaggccgacuuccugcugggcauggccaccgugaacaacugcgugagcuacagaaaccccgccgagggcaccugguacauccagagccugugccagagccugagagagagaugccccagaggcgacgacauccugaccauccugaccgaggugaacuacgaggugagcaacaaggacgacaagaagaacaugggcaagcagaugccccagcccaccuucacccugagaaagaagcugguguuccccagcgacuga

SEQ ID NO: 2572 - RNA, 1569 nt, Artificial Sequence
  CCDS2340.1 variant
augaagagccagggccagcacugguacagcagcagcgacaagaacugcaaggugagcuucagagagaagcugcugaucaucgacagcaaccugggcgugcaggacguggagaaccugaaguuccugugcaucggccuggugcccaacaagaagcuggagaagagcagcagcgccagcgacguguucgagcaccugcuggccgaggaccugcugagcgaggaggaccccuucuuccuggccgagcugcuguacaucaucagacagaagaagcugcugcagcaccugaacugcaccaaggaggagguggagagacugcugcccaccagacagagagugagccuguucagaaaccugcuguacgagcugagcgagggcaucgacagcgagaaccugaaggacaugaucuuccugcugaaggacagccugcccaagaccgagaugaccagccugagcuuccuggccuuccuggagaagcagggcaagaucgacgaggacaaccugaccugccuggaggaccugugcaagaccguggugcccaagcugcugagaaacaucgagaaguacaagagagagaaggccauccagaucgugaccccccccguggacaaggaggccgagagcuaccagggcgaggaggagcuggugagccagaccgacgugaagaccuuccuggaggcccugccccaggagagcuggcagaacaagcacgccggcagcaacggcaacagagccaccaacggcgcccccagccuggugagcagaggcaugcagggcgccagcgccaacacccugaacagcgagaccagcaccaagagagccgccguguacagaaugaacagaaaccacagaggccugugcgugaucgugaacaaccacagcuucaccagccugaaggacagacagggcacccacaaggacgccgagauccugagccacguguuccaguggcugggcuucaccgugcacauccacaacaacgugaccaagguggagauggagauggugcugcagaagcagaagugcaaccccgcccacgccgacggcgacugcuucguguucugcauccugacccacggcagauucggcgccguguacagcagcgacgaggcccugauccccaucagagagaucaugagccacuucaccgcccugcagugccccagacuggccgagaagcccaagcuguucuucauccaggccugccagggcgaggagauccagcccagcgugagcaucgaggccgacgcccugaaccccgagcaggcccccaccagccugcaggacagcauccccgccgaggccgacuuccugcugggccuggccaccgugcccggcuacgugagcuucagacacguggaggagggcagcugguacauccagagccugugcaaccaccugaagaagcuggugcccagacacgaggacauccugagcauccugaccgccgugaacgacgacgugagcagaagaguggacaagcagggcaccaagaagcagaugccccagcccgccuucacccugagaaagaagcugguguuccccgugccccuggacgcccugagccuguga

SEQ ID NO: 2573 - RNA, 1020 nt, Artificial Sequence
  EAW65632 variant
auguggcagcugugggccagccugugcugccugcuggugcuggccaacgccagaagcagacccagcuuccacccccugagcgacgagcuggugaacuacgugaacaagagaaacaccaccuggcaggccggccacaacuucuacaacguggacaugagcuaccugaagagacugugcggcaccuuccugggcggccccaagcccccccagagagugauguucaccgaggaccugaagcugcccgccagcuucgacgccagagagcaguggccccagugccccaccaucaaggagaucagagaccagggcagcugcggcagcugcugggccuucggcgccguggaggccaucagcgacagaaucugcauccacaccaacgcccacgugagcguggaggugagcgccgaggaccugcugaccugcugcggcagcaugugcggcgacggcugcaacggcggcuaccccgccgaggccuggaacuucuggaccagaaagggccuggugagcggcggccuguacgagagccacgugggcugcagacccuacagcaucccccccugcgagcaccacgugaacggcagcagaccccccugcaccggcgagggcgacacccccaagugcagcaagaucugcgagcccggcuacagccccaccuacaagcaggacaagcacuacggcuacaacagcuacagcgugagcaacagcgagaaggacaucauggccgagaucuacaagaacggccccguggagggcgccuucagcguguacagcgacuuccugcuguacaagagcggcguguaccagcacgugaccggcgagaugaugggcggccacgccaucagaauccugggcuggggcguggagaacggcacccccuacuggcugguggccaacagcuggaacaccgacuggggcgacaacggcuucuucaagauccugagaggccaggaccacugcggcaucgagagcgaggugguggccggcauccccagaaccgaccaguacugggagaagaucuga

SEQ ID NO: 2574 - RNA, 1020 nt, Artificial Sequence; identical to SEQ ID NO: 2573
  AAC37547 variant

SEQ ID NO: 2575 - RNA, 1002 nt, Artificial Sequence
  EAW62731 variant
augaaccccacccugauccuggccgccuucugccugggcaucgccagcgccacccugaccuucgaccacagccuggaggcccaguggaccaaguggaaggccaugcacaacagacuguacggcaugaacgaggagggcuggagaagagccgugugggagaagaacaugaagaugaucgagcugcacaaccaggaguacagagagggcaagcacagcuucaccauggccaugaacgccuucggcgacaugaccagcgaggaguucagacaggugaugaacggcuuccagaacagaaagcccagaaagggcaagguguuccaggagccccuguucuacgaggcccccagaagcguggacuggagagagaagggcuacgugacccccgugaagaaccagggccagugcggcagcugcugggccuucagcgccaccggcgcccuggagggccagauguucagaaagaccggcagacugaucagccugagcgagcagaaccugguggacugcagcggcccccagggcaacgagggcugcaacggcggccugauggacuacgccuuccaguacgugcaggacaacggcggccuggacagcgaggagagcuaccccuacgaggccaccgaggagagcugcaaguacaaccccaaguacagcguggccaacgacaccggcuucguggacauccccaagcaggagaaggcccugaugaaggccguggccaccgugggccccaucagcguggccaucgacgccggccacgagagcuuccuguucuacaaggagggcaucuacuucgagcccgacugcagcagcgaggacauggaccacggcgugcugguggugggcuacggcuucgagagcaccgagagcgacaacaacaaguacuggcuggugaagaacagcuggggcgaggaguggggcaugggcggcuacgugaagauggccaaggacagaagaaaccacugcggcaucgccagcgccgccagcuaccccaccguguga

SEQ ID NO: 2576 - RNA, 1002 nt, Artificial Sequence; identical to SEQ ID NO: 2575
  AAA66974 variant

SEQ ID NO: 2577 - RNA, 456 nt, Artificial Sequence
  AAG17239 variant
auggacuacgccuuccaguacgugcaggacaacggcggccuggacagcgaggagagcuaccccuacgaggccaccgaggagagcugcaaguacaaccccaaguacagcguggccaacgacaccggcuucguggacauccccaagcaggagaaggcccugaugaaggccguggccaccgugggccccaucagcguggccaucgacgccggccacgagagcuuccuguucuacaaggagggcaucuacuucgagcccgacugcagcagcgaggacauggaccacggcgugcugguggugggcuacggcuucgagagcaccgagagcgacaacaacaaguacuggcuggugaagaacagcuggggcgaggaguggggcaugggcggcuacgugaagauggccaaggacagaagaaaccacugcggcaucgccagcgccgccagcuaccccaccguguga

SEQ ID NO: 2578 - RNA, 984 nt, Artificial Sequence
  AAA51932 variant
augcuguuccugcugcugccccugcuggccgugcugcccggcgacggcaacgccgacggccugaaggagccccugagcuuccacgugaccuggaucgccagcuucuacaaccacagcuggaagcagaaccuggugagcggcuggcugagcgaccugcagacccacaccugggacagcaacagcagcaccaucguguuccugugccccuggagcagaggcaacuucagcaacgaggaguggaaggagcuggagacccuguucagaaucagaaccaucagaagcuucgagggcaucagaagauacgcccacgagcugcaguucgaguaccccuucgagauccaggugaccggcggcugcgagcugcacagcggcaaggugagcggcagcuuccugcagcuggccuaccagggcagcgacuucgugagcuuccagaacaacagcuggcugcccuaccccguggccggcaacauggccaagcacuucugcaaggugcugaaccagaaccagcacgagaacgacaucacccacaaccugcugagcgacaccugccccagauucauccugggccugcuggacgccggcaaggcccaccugcagagacaggugaagcccgaggccuggcugagccacggccccagccccggccccggccaccugcagcuggugugccacgugagcggcuucuaccccaagcccgugugggugauguggaugagaggcgagcaggagcagcagggcacccagagaggcgacauccugcccagcgccgacggcaccugguaccugagagccacccuggagguggccgccggcgaggccgccgaccugagcugcagagugaagcacagcagccuggagggccaggacaucgugcuguacugggagcaccacagcagcgugggcuucaucauccuggccgugaucgugccccugcugcugcugaucggccuggcccugugguucagaaagagaugcuucugcuga

SEQ ID NO: 2579 - RNA, 1002 nt, Artificial Sequence
  AAA51939 variant
augcugcugcugcccuuccagcugcuggccgugcuguuccccggcggcaacagcgagcacgccuuccagggccccaccagcuuccacgugauccagaccagcagcuucaccaacagcaccugggcccagacccagggcagcggcuggcuggacgaccugcagauccacggcugggacagcgacagcggcaccgccaucuuccugaagcccuggagcaagggcaacuucagcgacaaggagguggccgagcuggaggagaucuucagaguguacaucuucggcuucgccagagaggugcaggacuucgccggcgacuuccagaugaaguaccccuucgagauccagggcaucgccggcugcgagcugcacagcggcggcgccaucgugagcuuccugagaggcgcccugggcggccuggacuuccugagcgugaagaacgccagcugcgugcccagccccgagggcggcagcagagcccagaaguucugcgcccugaucauccaguaccagggcaucauggagaccgugagaauccugcuguacgagaccugccccagauaccugcugggcgugcugaacgccggcaaggccgaccugcagagacaggugaagcccgaggccuggcugagcagcggccccagccccggccccggcagacugcagcuggugugccacgugagcggcuucuaccccaagcccgugugggugauguggaugagaggcgagcaggagcagcagggcacccagcugggcgacauccugcccaacgccaacuggaccugguaccugagagccacccuggacguggccgacggcgaggccgccggccugagcugcagagugaagcacagcagccuggagggccaggacaucauccuguacuggagaaaccccaccagcaucggcagcaucgugcuggccaucaucgugcccagccugcugcugcugcugugccuggcccugugguacaugagaagaagaagcuaccagaacauccccuga

SEQ ID NO: 2580 - RNA, 1002 nt, Artificial Sequence
  AAI26466 variant
augcuguuccugcaguuccugcugcuggcccugcugcugcccggcggcgacaacgccgacgccagccaggagcacgugagcuuccacgugauccagaucuucagcuucgugaaccagagcugggccagaggccagggcagcggcuggcuggacgagcugcagacccacggcugggacagcgagagcggcaccaucaucuuccugcacaacuggagcaagggcaacuucagcaacgaggagcugagcgaccuggagcugcuguucagauucuaccuguucggccugaccagagagauccaggaccacgccagccaggacuacagcaaguaccccuucgaggugcaggugaaggccggcugcgagcugcacagcggcaagagccccgagggcuucuuccagguggccuucaacggccuggaccugcugagcuuccagaacaccaccugggugcccagccccggcugcggcagccuggcccagagcgugugccaccugcugaaccaccaguacgagggcgugaccgagaccguguacaaccugaucagaagcaccugccccagauuccugcugggccugcuggacgccggcaagauguacgugcacagacaggugagacccgaggccuggcugagcagcagacccagccugggcagcggccagcugcugcuggugugccacgccagcggcuucuaccccaagcccgugugggugaccuggaugagaaacgagcaggagcagcugggcaccaagcacggcgacauccugcccaacgccgacggcaccugguaccugcaggugauccuggagguggccagcgaggagcccgccggccugagcugcagagugagacacagcagccugggcggccaggacaucauccuguacuggggccaccacuucagcaugaacuggaucgcccugguggugaucgugccccuggugauccugaucgugcuggugcugugguucaagaagcacugcagcuaccaggacauccuguga

SEQ ID NO: 2581 - RNA, 1008 nt, Artificial Sequence
  AAA59672 variant
augggcugccugcuguuccugcugcugugggcccugcugcaggccuggggcagcgccgaggugccccagagacuguucccccugagaugccugcagaucagcagcuucgccaacagcagcuggaccagaaccgacggccuggccuggcugggcgagcugcagacccacagcuggagcaacgacagcgacaccgugagaagccugaagcccuggagccagggcaccuucagcgaccagcagugggagacccugcagcacaucuucagaguguacagaagcagcuucaccagagacgugaaggaguucgccaagaugcugagacugagcuacccccuggagcugcaggugagcgccggcugcgaggugcaccccggcaacgccagcaacaacuucuuccacguggccuuccagggcaaggacauccugagcuuccagggcaccagcugggagcccacccaggaggccccccugugggugaaccuggccauccaggugcugaaccaggacaaguggaccagagagaccgugcaguggcugcugaacggcaccugcccccaguucgugagcggccugcuggagagcggcaagagcgagcugaagaagcaggugaagcccaaggccuggcugagcagaggccccagccccggccccggcagacugcugcuggugugccacgugagcggcuucuaccccaagcccgugugggugaaguggaugagaggcgagcaggagcagcagggcacccagcccggcgacauccugcccaacgccgacgagaccugguaccugagagccacccuggacgugguggccggcgaggccgccggccugagcugcagagugaagcacagcagccuggagggccaggacaucgugcuguacuggggcggcagcuacaccagcaugggccugaucgcccuggccgugcuggccugccugcuguuccugcugaucgugggcuucaccagcagauucaagagacagaccagcuaccagggcgugcuguga

SEQ ID NO: 2582 - RNA, 1167 nt, Artificial Sequence
  EAW52830 variant
augcugcugcuguuccugcuguucgagggccugugcugccccggcgagaacaccgccgccccccaggcccugcagagcuaccaccuggccgccgaggagcagcugagcuucagaaugcugcagaccagcagcuucgccaaccacagcugggcccacagcgagggcagcggcuggcugggcgaccugcagacccacggcugggacaccgugcugggcaccaucagauuccugaagcccuggagccacggcaacuucagcaagcaggagcugaagaaccugcagagccuguuccagcuguacuuccacagcuucauccagaucgugcaggccagcgccggccaguuccagcuggaguaccccuucgagauccagauccuggccggcugcagaaugaacgccccccagaucuuccugaacauggccuaccagggcagcgacuuccugagcuuccagggcaucagcugggagcccagccccggcgccggcaucagagcccagaacaucugcaaggugcugaacagauaccuggacaucaaggagauccugcagagccugcugggccacaccugccccagauuccuggccggccugauggaggccggcgagagcgagcugaagagaaaggugaagcccgaggccuggcugagcugcggccccagccccggccccggcagacugcagcuggugugccacgugagcggcuucuaccccaagcccgugugggugauguggaugagaggcgagcaggagcagagaggcacccagagaggcgacgugcugcccaacgccgacgagaccugguaccugagagccacccuggacguggccgccggcgaggccgccggccugagcugcagagugaagcacagcagccugggcggccacgaccugaucauccacuggggcggcuacagcaucuuccugauccugaucugccugaccgugaucgugacccuggugauccugguggugguggacagcagacugaagaagcagagcagcaacaagaacauccugagcccccacacccccagccccguguuccugaugggcgccaacacccaggacaccaagaacagcagacaccaguucugccuggcccaggugagcuggaucaagaacagagugcugaagaaguggaagaccagacugaaccagcugugguga

SEQ ID NO: 2583 - RNA, 894 nt, Artificial Sequence
  AAA35581 variant
augaccacccccagaaacagcgugaacggcaccuuccccgccgagcccaugaagggccccaucgccaugcagagcggccccaagccccuguucagaagaaugagcagccuggugggccccacccagagcuucuucaugagagagagcaagacccugggcgccgugcagaucaugaacggccuguuccacaucgcccugggcggccugcugaugauccccgccggcaucuacgcccccaucugcgugaccgugugguacccccuguggggcggcaucauguacaucaucagcggcagccugcuggccgccaccgagaagaacagcagaaagugccuggugaagggcaagaugaucaugaacagccugagccuguucgccgccaucagcggcaugauccugagcaucauggacauccugaacaucaagaucagccacuuccugaagauggagagccugaacuucaucagagcccacacccccuacaucaacaucuacaacugcgagcccgccaaccccagcgagaagaacagccccagcacccaguacugcuacagcauccagagccuguuccugggcauccugagcgugaugcugaucuucgccuucuuccaggagcuggugaucgccggcaucguggagaacgaguggaagagaaccugcagcagacccaagagcaacaucgugcugcugagcgccgaggagaagaaggagcagaccaucgagaucaaggaggagguggugggccugaccgagaccagcagccagcccaagaacgaggaggacaucgagaucauccccauccaggaggaggaggaggaggagaccgagaccaacuuccccgagcccccccaggaccaggagagcagccccaucgagaacgacagcagccccuga

SEQ ID NO: 2584 - RNA, 1989 nt, Artificial Sequence
  AAC18956 variant
auggagagcaagaccgagaaguggauggagagaauccaccugaacgugagcgagagacccuuccccccccacauccagcugccccccgagauccaggagagccaggaggugacccugaccugccugcugaacuucagcugcuacggcuaccccauccagcugcaguggcugcuggagggcgugcccaugagacaggccgccgugaccagcaccagccugaccaucaagagcguguucaccagaagcgagcugaaguucagcccccaguggagccaccacggcaagaucgugaccugccagcugcaggacgccgacggcaaguuccugagcaacgacaccgugcagcugaacgugaagcacacccccaagcuggagaucaaggugacccccagcgacgccaucgugagagagggcgacagcgugaccaugaccugcgaggugagcagcaccaaccccgaguacaccaccgugagcuggcugaaggacggcaccagccugaagaagcagaacaccuucacccugaaccugagagaggugaccaaggaccagagcggcaaguacugcugccaggugagcaacgacgugggccccggcagaagcgaggagguguuccugcaggugcaguacgcccccgagcccagcaccgugcagauccugcacagccccgccguggagggcagccagguggaguuccugugcaugagccuggccaacccccugcccaccaacuacaccugguaccacaacggcaaggagaugcagggcagaaccgaggagaaggugcacauccccaagauccugcccuggcacgccggcaccuacagcugcguggccgagaacauccugggcaccggccagagaggccccggcgccgagcuggacgugcaguacccccccaagaaggugaccaccgugauccagaaccccaugcccaucagagagggcgacaccgugacccugagcugcaacuacaacagcagcaaccccagcgugaccagauacgaguggaagccccacggcgccugggaggagcccagccugggcgugcugaagauccagaaggugggcugggacaacaccaccaucgccugcgccagaugcaacagcuggugcagcugggccagccccguggcccugaacgugcaguacgcccccagagacgugagagugagaaagaucaagccccugagcgagauccacagcggcaacagcgugagccugcagugcgacuucagcagcagccaccccaaggaggugcaguucuucugggagaagaacggcagacugcugggcaaggagagccagcugaacuucgacagcaucagccccgaggacgccggcagcuacagcugcugggugaacaacagcaucggccagaccgccagcaaggccuggacccuggaggugcuguacgcccccagaagacugagagugagcaugagccccggcgaccaggugauggagggcaagagcgccacccugagaugcgagagcgacgccaacccccccgugagccacuacaccugguucgacuggaacaaccagagccugcccuaccacagccagaagcugagacuggagcccgugaaggugcagcacagcggcgccuacuggugccagggcaccaacagcgugggcaagggcagaagcccccugagcacccugaccguguacuacagccccgagaccaucggcagaagaguggccgugggccugggcagcugccuggccauccugauccuggccaucugcggccugaagcugcagagaagagacgccgagagcagcgagaugcagagaccccccagaaccugcgacgacaccgugaccuacagcgcccugcacaagagacaggugggcgacuacgagaacgugauccccgacuuccccgaggacgagggcauccacuacagcgagcugauccaguucggcgugggcgagagaccccaggcccaggagaacguggacuacgugauccugaagcacuga

SEQ ID NO: 2585 - RNA, 2544 nt, Artificial Sequence
  AAB06448 variant
augcaccugcugggccccuggcugcugcugcuggugcuggaguaccuggccuucagcgacagcagcaaguggguguucgagcaccccgagacccuguacgccugggagggcgccugcguguggauccccugcaccuacagagcccuggacggcgaccuggagagcuucauccuguuccacaaccccgaguacaacaagaacaccagcaaguucgacggcaccagacuguacgagagcaccaaggacggcaaggugcccagcgagcagaagagagugcaguuccugggcgacaagaacaagaacugcacccugagcauccaccccgugcaccugaacgacagcggccagcugggccugagaauggagagcaagaccgagaaguggauggagagaauccaccugaacgugagcgagagacccuuccccccccacauccagcugccccccgagauccaggagagccaggaggugacccugaccugccugcugaacuucagcugcuacggcuaccccauccagcugcaguggcugcuggagggcgugcccaugagacaggccgccgugaccagcaccagccugaccaucaagagcguguucaccagaagcgagcugaaguucagcccccaguggagccaccacggcaagaucgugaccugccagcugcaggacgccgacggcaaguuccugagcaacgacaccgugcagcugaacgugaagcacacccccaagcuggagaucaaggugacccccagcgacgccaucgugagagagggcgacagcgugaccaugaccugcgaggugagcagcagcaaccccgaguacaccaccgugagcuggcugaaggacggcaccagccugaagaagcagaacaccuucacccugaaccugagagaggugaccaaggaccagagcggcaaguacugcugccaggugagcaacgacgugggccccggcagaagcgaggagguguuccugcaggugcaguacgcccccgagcccagcaccgugcagauccugcacagccccgccguggagggcagccagguggaguuccugugcaugagccuggccaacccccugcccaccaacuacaccugguaccacaacggcaaggagaugcagggcagaaccgaggagaaggugcacauccccaagauccugcccuggcacgccggcaccuacagcugcguggccgagaacauccugggcaccggccagagaggccccggcgccgagcuggacgugcaguacccccccaagaaggugaccaccgugauccagaaccccaugcccaucagagagggcgacaccgugacccugagcugcaacuacaacagcagcaaccccagcgugaccagauacgaguggaagccccacggcgccugggaggagcccagccugggcgugcugaagauccagaacgugggcugggacaacaccaccaucgccugcgccgccugcaacagcuggugcagcugggccagccccguggcccugaacgugcaguacgcccccagagacgugagagugagaaagaucaagccccugagcgagauccacagcggcaacagcgugagccugcagugcgacuucagcagcagccaccccaaggaggugcaguucuucugggagaagaacggcagacugcugggcaaggagagccagcugaacuucgacagcaucagccccgaggacgccggcagcuacagcugcugggugaacaacagcaucggccagaccgccagcaaggccuggacccuggaggugcuguacgcccccagaagacugagagugagcaugagccccggcgaccaggugauggagggcaagagcgccacccugaccugcgagagcgacgccaacccccccgugagccacuacaccugguucgacuggaacaaccagagccugcccuaccacagccagaagcugagacuggagcccgugaaggugcagcacagcggcgccuacuggugccagggcaccaacagcgugggcaagggcagaagcccccugagcacccugaccguguacuacagccccgagaccaucggcagaagaguggccgugggccugggcagcugccuggccauccugauccuggccaucugcggccugaagcugcagagaagauggaagagaacccagagccagcagggccugcaggagaacagcagcggccagagcuucuucgugagaaacaagaaggugagaagagccccccugagcgagggcccccacagccugggcugcuacaaccccaugauggaggacggcaucagcuacaccacccugagauuccccgagaugaacauccccagaaccggcgacgccgagagcagcgagaugcagagacccccccccgacugcgacgacaccgugaccuacagcgcccugcacaagagacaggugggcgacuacgagaacgugauccccgacuuccccgaggacgagggcauccacuacagcgagcugauccaguucggcgugggcgagagaccccaggcccaggagaacguggacuacgugauccugaagcacuga

SEQ ID NO: 2586 - RNA, 2544 nt, Artificial Sequence; identical to SEQ ID NO: 2585
  ABK41939 variant

SEQ ID NO: 2587 - RNA, 1605 nt, Artificial Sequence
  CAE47548 variant
augcugagaagaagaggcagccccggcaugggcgugcacgugggcgccgcccugggcgcccugugguucugccugaccggcgcccuggaggugcaggugcccgaggaccccgugguggcccuggugggcaccgacgccacccugugcugcagcuucagccccgagcccggcuucagccuggcccagcugaaccugaucuggcagcugaccgacaccaagcagcuggugcacagcuucgccgagggccaggaccagggcagcgccuacgccaacagaaccgcccuguuccccgaccugcuggcccagggcaacgccagccugagacugcagagagugagaguggccgacgagggcagcuucaccugcuucgugagcaucagagacuucggcagcgccgccgugagccugcagguggccgcccccuacagcaagcccagcaugacccuggagcccaacaaggaccugagacccggcgacaccgugaccaucaccugcagcagcuaccagggcuaccccgaggccgagguguucuggcaggacggccagggcgugccccugaccggcaacgugaccaccagccagauggccaacgagcagggccuguucgacgugcacagcauccugagaguggugcugggcgccaacggcaccuacagcugccuggugagaaaccccgugcugcagcaggacgcccacagcagcgugaccaucaccccccagagaagccccaccggcgccguggaggugcaggugcccgaggaccccgugguggcccuggugggcaccgacgccacccugagaugcagcuucagccccgagcccggcuucagccuggcccagcugaaccugaucuggcagcugaccgacaccaagcagcuggugcacagcuucaccgagggcagagaccagggcagcgccuacgccaacagaaccgcccuguuccccgaccugcuggcccagggcaacgccagccugagacugcagagagugagaguggccgacgagggcagcuucaccugcuucgugagcaucagagacuucggcagcgccgccgugagccugcagguggccgcccccuacagcaagcccagcaugacccuggagcccaacaaggaccugagacccggcgacaccgugaccaucaccugcagcagcuacagaggcuaccccgaggccgagguguucuggcaggacggccagggcgugccccugaccggcaacgugaccaccagccagauggccaacgagcagggccuguucgacgugcacagcgugcugagaguggugcugggcgccaacggcaccuacagcugccuggugagaaaccccgugcugcagcaggacgcccacggcagcgugaccaucaccggccagcccaugaccuucccccccgaggcccugugggugaccgugggccugagcgugugccugaucgcccugcugguggcccuggccuucgugugcuggagaaagaucaagcagagcugcgaggaggagaacgccggcgccgaggaccaggacggcgagggcgagggcagcaagaccgcccugcagccccugaagcacagcgacagcaaggaggacgacggccaggagaucgccuga

SEQ ID NO: 2588 - RNA, 639 nt, Artificial Sequence
  BAG57312 variant
augccccugcugcugcugcugccccugcugugggccgaccugacccacagacccaagauccugauccccggcacccuggagcccggccacagcaagaaccugaccugcagcgugagcugggccugcgagcagggcaccccccccaucuucagcuggcugagcgccgcccccaccagccugggccccagaaccacccacagcagcgugcugaucaucacccccagaccccaggaccacggcaccaaccugaccugccaggugaaguucgccggcgccggcgugaccaccgagagaaccauccagcugaacgugaccuacgugccccagaaccccaccaccggcaucuuccccggcgacggcagcggcaagcaggagaccagagccggcguggugcacggcgccaucggcggcgccggcgugaccgcccugcuggcccugugccugugccugaucuucuucaucgugaagacccacagaagaaaggccgccagaaccgccgugggcagaaacgacacccaccccaccaccggcagcgccagccccgugagcgacggcgccagcuggcaccccgugugccccgccgacaccagcagccagugcggcccccccagcugccccauccagcacuuccagaacuga

SEQ ID NO: 2589 - RNA, 1095 nt, Artificial Sequence
  AAK83654 variant
augccccugcugcugcugcugccccugcugugggccggcgcccuggccauggaccccaacuucuggcugcaggugcaggagagcgugaccgugcaggagggccugugcgugcuggugcccugcaccuucuuccaccccauccccuacuacgacaagaacagccccgugcacggcuacugguucagagagggcgccaucaucagcagagacagccccguggccaccaacaagcuggaccaggaggugcaggaggagacccagggcagauucagacugcugggcgaccccagcagaaacaacugcagccugagcaucguggacgccagaagaagagacaacggcagcuacuucuucagaauggagagaggcagcaccaaguacagcuacaagagcccccagcugagcgugcacgugaccgaccugacccacagacccaagauccugauccccggcacccuggagcccggccacagcaagaaccugaccugcagcgugagcugggccugcgagcagggcaccccccccaucuucagcuggcugagcgccgcccccaccagccugggccccagaaccacccacagcagcgugcugaucaucacccccagaccccaggaccacggcaccaaccugaccugccaggugaaguucgccggcgccggcgugaccaccgagagaaccauccagcugaacgugaccuacgugccccagaaccccaccaccggcaucuuccccggcgacggcagcggcaagcaggagaccagagccggcguggugcacggcgccaucggcggcgccggcgugaccgcccugcuggcccugugccugugccugaucuucuucaucgugaagacccacagaagaaaggccgccagaaccgccgugggcagaaacgacacccaccccaccaccggcagcgccagccccaagcaccagaagaagagcaagcugcacggccccaccgagaccagcagcugcagcggcgccgcccccaccguggagauggacgaggagcugcacuacgccagccugaacuuccacggcaugaaccccagcaaggacaccagcaccgaguacagcgaggugagaacccaguga

SEQ ID NO: 2590 - RNA, 1095 nt, Artificial Sequence; identical to SEQ ID NO: 2589
  CAD36509 variant

SEQ ID NO: 2591 - RNA, 624 nt, Artificial Sequence
  AAA52295 variant
augcagagcggcacccacuggagagugcugggccugugccugcugagcgugggcguguggggccaggacggcaacgaggagaugggcggcaucacccagacccccuacaaggugagcaucagcggcaccaccgugauccugaccugcccccaguaccccggcagcgagauccuguggcagcacaacgacaagaacaucggcggcgacgaggacgacaagaacaucggcagcgacgaggaccaccugagccugaaggaguucagcgagcuggagcagagcggcuacuacgugugcuaccccagaggcagcaagcccgaggacgccaacuucuaccuguaccugagagccagagugugcgagaacugcauggagauggacgugaugagcguggccaccaucgugaucguggacaucugcaucaccggcggccugcugcugcugguguacuacuggagcaagaacagaaaggccaaggccaagcccgugaccagaggcgccggcgccggcggcagacagagaggccagaacaaggagagacccccccccgugcccaaccccgacuacgagcccaucagaaagggccagagagaccuguacagcggccugaaccagagaagaaucuga

SEQ ID NO: 2592 - RNA, 495 nt, Artificial Sequence
  AAH25703 variant
augaaguggaaggcccuguucaccgccgccauccugcaggcccagcugcccaucaccgaggcccagagcuucggccugcuggaccccaagcugugcuaccugcuggacggcauccuguucaucuacggcgugauccugaccgcccuguuccugagagugaaguucagcagaagcgccgacgcccccgccuaccagcagggccagaaccagcuguacaacgagcugaaccugggcagaagagaggaguacgacgugcuggacaagagaagaggcagagaccccgagaugggcggcaagccccagagaagaaagaacccccaggagggccuguacaacgagcugcagaaggacaagauggccgaggccuacagcgagaucggcaugaagggcgagagaagaagaggcaagggccacgacggccuguaccagggccugagcaccgccaccaaggacaccuacgacgcccugcacaugcaggcccugccccccagauga

SEQ ID NO: 2593 - RNA, 2229 nt, Artificial Sequence
  CCDS7897.1 variant
auggacaaguucugguggcacgccgccuggggccugugccuggugccccugagccuggcccagaucgaccugaacaucaccugcagauucgccggcguguuccacguggagaagaacggcagauacagcaucagcagaaccgaggccgccgaccugugcaaggccuucaacagcacccugcccaccauggcccagauggagaaggcccugagcaucggcuucgagaccugcagauacggcuucaucgagggccacguggugauccccagaauccaccccaacagcaucugcgccgccaacaacaccggcguguacauccugaccagcaacaccagccaguacgacaccuacugcuucaacgccagcgccccccccgaggaggacugcaccagcgugaccgaccugcccaacgccuucgacggccccaucaccaucaccaucgugaacagagacggcaccagauacgugcagaagggcgaguacagaaccaaccccgaggacaucuaccccagcaaccccaccgacgacgacgugagcagcggcagcagcagcgagagaagcagcaccagcggcggcuacaucuucuacaccuucagcaccgugcaccccauccccgacgaggacagccccuggaucaccgacagcaccgacagaauccccgccaccacccugaugagcaccagcgccaccgccaccgagaccgccaccaagagacaggagaccugggacugguucagcuggcuguuccugcccagcgagagcaagaaccaccugcacaccaccacccagauggccggcaccagcagcaacaccaucagcgccggcugggagcccaacgaggagaacgaggacgagagagacagacaccugagcuucagcggcagcggcaucgacgacgacgaggacuucaucagcagcaccaucagcaccacccccagagccuucgaccacaccaagcagaaccaggacuggacccaguggaaccccagccacagcaaccccgaggugcugcugcagaccaccaccagaaugaccgacguggacagaaacggcaccaccgccuacgagggcaacuggaaccccgaggcccaccccccccugauccaccacgagcaccacgaggaggaggagaccccccacagcaccagcaccauccaggccacccccagcagcaccaccgaggagaccgccacccagaaggagcagugguucggcaacagauggcacgagggcuacagacagacccccaaggaggacagccacagcaccaccggcaccgccgccgccagcgcccacaccagccaccccaugcagggcagaaccacccccagccccgaggacagcagcuggaccgacuucuucaaccccaucagccaccccaugggcagaggccaccaggccggcagaagaauggacauggacagcagccacagcaucacccugcagcccaccgccaaccccaacaccggccugguggaggaccuggacagaaccggcccccugagcaugaccacccagcagagcaacagccagagcuucagcaccagccacgagggccuggaggaggacaaggaccaccccaccaccagcacccugaccagcagcaacagaaacgacgugaccggcggcagaagagaccccaaccacagcgagggcagcaccacccugcuggagggcuacaccagccacuacccccacaccaaggagagcagaaccuucauccccgugaccagcgccaagaccggcagcuucggcgugaccgccgugaccgugggcgacagcaacagcaacgugaacagaagccugagcggcgaccaggacaccuuccaccccagcggcggcagccacaccacccacggcagcgagagcgacggccacagccacggcagccaggagggcggcgccaacaccaccagcggccccaucagaaccccccagauccccgaguggcugaucauccuggccagccugcuggcccuggcccugauccuggccgugugcaucgccgugaacagcagaagaagaugcggccagaagaagaagcuggugaucaacagcggcaacggcgccguggaggacagaaagcccagcggccugaacggcgaggccagcaagagccaggagauggugcaccuggugaacaaggagagcagcgagacccccgaccaguucaugaccgccgacgagaccagaaaccugcagaacguggacaugaagaucggcguguga

SEQ ID NO: 2594 - RNA, 2100 nt, Artificial Sequence
  XM_006718388.1 variant
auggacaaguucugguggcacgccgccuggggccugugccuggugccccugagccuggcccagaucgaccugaacaucaccugcagauucgccggcguguuccacguggagaagaacggcagauacagcaucagcagaaccgaggccgccgaccugugcaaggccuucaacagcacccugcccaccauggcccagauggagaaggcccugagcaucggcuucgagaccugcagauacggcuucaucgagggccacguggugauccccagaauccaccccaacagcaucugcgccgccaacaacaccggcguguacauccugaccagcaacaccagccaguacgacaccuacugcuucaacgccagcgccccccccgaggaggacugcaccagcgugaccgaccugcccaacgccuucgacggccccaucaccaucaccaucgugaacagagacggcaccagauacgugcagaagggcgaguacagaaccaaccccgaggacaucuaccccagcaaccccaccgacgacgacgugagcagcggcagcagcagcgagagaagcagcaccagcggcggcuacaucuucuacaccuucagcaccgugcaccccauccccgacgaggacagccccuggaucaccgacagcaccgacagaauccccgccaccacccugaugagcaccagcgccaccgccaccgagaccgccaccaagagacaggagaccugggacugguucagcuggcuguuccugcccagcgagagcaagaaccaccugcacaccaccacccagauggccggcaccagcagcaacaccaucagcgccggcugggagcccaacgaggagaacgaggacgagagagacagacaccugagcuucagcggcagcggcaucgacgacgacgaggacuucaucagcagcaccaucagcaccacccccagagccuucgaccacaccaagcagaaccaggacuggacccaguggaaccccagccacagcaaccccgaggugcugcugcagaccaccaccagaaugaccgacguggacagaaacggcaccaccgccuacgagggcaacuggaaccccgaggcccaccccccccugauccaccacgagcaccacgaggaggaggagaccccccacagcaccagcaccaccgccagcgcccacaccagccaccccaugcagggcagaaccacccccagccccgaggacagcagcuggaccgacuucuucaaccccaucagccaccccaugggcagaggccaccaggccggcagaagaauggacauggacagcagccacagcaucacccugcagcccaccgccaaccccaacaccggccugguggaggaccuggacagaaccggcccccugagcaugaccacccagcagagcaacagccagagcuucagcaccagccacgagggccuggaggaggacaaggaccaccccaccaccagcacccugaccagcagcaacagaaacgacgugaccggcggcagaagagaccccaaccacagcgagggcagcaccacccugcuggagggcuacaccagccacuacccccacaccaaggagagcagaaccuucauccccgugaccagcgccaagaccggcagcuucggcgugaccgccgugaccgugggcgacagcaacagcaacgugaacagaagccugagcggcgaccaggacaccuuccaccccagcggcggcagccacaccacccacggcagcgagagcgacggccacagccacggcagccaggagggcggcgccaacaccaccagcggccccaucagaaccccccagauccccgaguggcugaucauccuggccagccugcuggcccuggcccugauccuggccgugugcaucgccgugaacagcagaagaagaugcggccagaagaagaagcuggugaucaacagcggcaacggcgccguggaggacagaaagcccagcggccugaacggcgaggccagcaagagccaggagauggugcaccuggugaacaaggagagcagcgagacccccgaccaguucaugaccgccgacgagaccagaaaccugcagaacguggacaugaagaucggcguguga

SEQ ID NO: 2595 - RNA, 1377 nt, Artificial Sequence
  AAA35572 variant
augaacagaggcgugcccuucagacaccugcugcuggugcugcagcuggcccugcugcccgccgccacccagggcaagaagguggugcugggcaagaagggcgacaccguggagcugaccugcaccgccagccagaagaagagcauccaguuccacuggaagaacagcaaccagaucaagauccugggcaaccagggcagcuuccugaccaagggccccagcaagcugaacgacagagccgacagcagaagaagccugugggaccagggcaacuucccccugaucaucaagaaccugaagaucgaggacagcgacaccuacaucugcgagguggaggaccagaaggaggaggugcagcugcugguguucggccugaccgccaacagcgacacccaccugcugcagggccagagccugacccugacccuggagagcccccccggcagcagccccagcgugcagugcagaagccccagaggcaagaacauccagggcggcaagacccugagcgugagccagcuggagcugcaggacagcggcaccuggaccugcaccgugcugcagaaccagaagaagguggaguucaagaucgacaucguggugcuggccuuccagaaggccagcagcaucguguacaagaaggagggcgagcagguggaguucagcuucccccuggccuucaccguggagaagcugaccggcagcggcgagcugugguggcaggccgagagagccagcagcagcaagagcuggaucaccuucgaccugaagaacaaggaggugagcgugaagagagugacccaggaccccaagcugcagaugggcaagaagcugccccugcaccugacccugccccaggcccugccccaguacgccggcagcggcaaccugacccuggcccuggaggccaagaccggcaagcugcaccaggaggugaaccugguggugaugagagccacccagcugcagaagaaccugaccugcgagguguggggccccaccagccccaagcugaugcugagccugaagcuggagaacaaggaggccaaggugagcaagagagagaaggccgugugggugcugaaccccgaggccggcauguggcagugccugcugagcgacagcggccaggugcugcuggagagcaacaucaaggugcugcccaccuggagcacccccgugcagcccauggcccugaucgugcugggcggcguggccggccugcugcuguucaucggccugggcaucuucuucugcgugagaugcagacacagaagaagacaggccgagagaaugagccagaucaagagacugcugagcgagaagaagaccugccagugcccccacagauuccagaagaccugcagccccaucuga

SEQ ID NO: 2596 - RNA, 186 nt, Artificial Sequence
  CAA44323 variant
augaagagauuccuguuccugcugcugaccaucagccugcuggugauggugcagauccagaccggccugagcggccagaacgacaccagccagaccagcagccccagcgccagcagcaacaucagcggcggcaucuuccuguucuucguggccaacgccaucauccaccuguucugcuucagcuga

SEQ ID NO: 2597 - RNA, 186 nt, Artificial Sequence
  AAP35780 variant
augaagagauuccuguuccugcugcugaccaucagccugcuggugauggugcagauccagaccggccugagcggccagaacgacaccagccagaccagcagccccagcgccagcagcagcaugagcggcggcaucuuccuguucuucguggccaacgccaucauccaccuguucugcuucagcuga

SEQ ID NO: 2598 - RNA, 186 nt, Artificial Sequence; identical to SEQ ID NO: 2596
  ACS44650 variant

SEQ ID NO: 2599 - RNA, 954 nt, Artificial Sequence
  EAW93489 variant
augaccguggccagacccagcgugcccgccgcccugccccugcugggcgagcugcccagacugcugcugcuggugcugcugugccugcccgccguguggggcgacugcggccugccccccgacgugcccaacgcccagcccgcccuggagggcagaaccagcuuccccgaggacaccgugaucaccuacaagugcgaggagagcuucgugaagauccccggcgagaaggacagcgugaucugccugaagggcagccaguggagcgacaucgaggaguucugcaaccagaagagcugccccaaccccggcgagaucagaaacggccagaucgacgugcccggcggcauccuguucggcgccaccaucagcuucagcugcaacaccggcuacaagcuguucggcagcaccagcagcuucugccugaucagcggcagcagcgugcaguggagcgacccccugcccgagugcagagagaucuacugccccgcccccccccagaucgacaacggcaucauccagggcgagagagaccacuacggcuacagacagagcgugaccuacgccugcaacaagggcuucaccaugaucggcgagcacagcaucuacugcaccgugaacaacgacgagggcgaguggagcggccccccccccgagugcagaggcaagagccugaccagcaaggugccccccaccgugcagaagcccaccaccgugaacgugcccaccaccgaggugagccccaccagccagaagaccaccaccaagaccaccacccccaacgcccaggccaccagaagcacccccgugagcagaaccaccaagcacuuccacgagaccacccccaacaagggcagcggcaccaccagcggcaccaccagacugcugagcggccacaccugcuucacccugaccggccugcugggcacccuggugaccaugggccugcugaccuga

SEQ ID NO: 2600 - RNA, 882 nt, Artificial Sequence
  EAW93497 variant
augaucggcgagcacagcaucuacugcaccgugaacaacgacgagggcgaguggagcggccccccccccgagugcagaggcaagagccugaccagcaaggugccccccaccgugcagaagcccaccaccgugaacgugcccaccaccgaggugagccccaccagccagaagaccaccaccaagaccaccacccccaacgcccagggcaccgagacccccagcgugcugcagaagcacaccaccgagaacgugagcgccaccagaaccccccccaccccccagaagcccaccaccgugaacgugcccgccaccaucgugacccccaccccccagaagcccaccaccaucaacgugcccgccaccggcgugagcagcaccccccagagacacaccaucgugaacgugagcgccaccggcacccugcccacccugcagaagcccaccagagccaacgacagcgccaccaagagccccgccgccgcccagaccagcuucaucagcaagacccugagcaccaagacccccagcgccgcccagaaccccaugaugaccaacgccagcgccacccaggccacccugaccgcccagaaguucaccaccgccaagguggccuucacccagagccccagcgccgccagaaagagcaccaacgugcacagccccgugaccaacggccugaagagcacccagagauuccccagcgcccacaucaccgccaccagaagcacccccgugagcagaaccaccaagcacuuccacgagaccacccccaacaagggcagcggcaccaccagcggcaccaccagacugcugagcggccacaccugcuucacccugaccggccugcugggcacccuggugaccaugggccugcugaccuga

SEQ ID NO: 2601 - RNA, 804 nt, Artificial Sequence
  EAW93493 variant
augaucggcgagcacagcaucuacugcaccgugaacaacgacgagggcgaguggagcggccccccccccgagugcagaggcaagagccugaccagcaaggugccccccaccgugcagaagcccaccaccgugaacgugcccaccaccgaggugagccccaccagccagaagaccaccaccaagaccaccacccccaacgcccagggcaccgagacccccagcgugcugcagaagcacaccaccgagaacgugagcgccaccagaaccccccccaccccccagaagcccaccaccgugaacgugcccgccaccaucgugacccccaccccccagaagcccaccaccaucaacgugcccgccaccggcgugagcagcaccccccagagacacaccaucgugaacgugagcgccaccggcacccugcccacccugcagaagcccaccagagccaacgacagcgccaccaagagccccgccgccgcccagaccagcuucaucagcaagacccugagcaccaagacccccagcgccgcccagaaccccaugaugaccaacgccagcgccacccaggccacccugaccgcccagaaguucaccaccgccaagguggccuucacccagagccccagcgccgcccccaccagaagcacccccgugagcagaaccaccaagcacuuccacgagaccacccccaacaagggcagcggcaccaccagcggcaccaccagacugcugagcggccacaccugcuucacccugaccggccugcugggcacccuggugaccaugggccugcugaccuga

SEQ ID NO: 2602 - RNA, 1146 nt, Artificial Sequence
  AAA52168 variant
augaccguggccagacccagcgugcccgccgcccugccccugcugggcgagcugcccagacugcugcugcuggugcugcugugccugcccgccguguggggcgacugcggccugccccccgacgugcccaacgcccagcccgcccuggagggcagaaccagcuuccccgaggacaccgugaucaccuacaagugcgaggagagcuucgugaagauccccggcgagaaggacagcgugaucugccugaagggcagccaguggagcgacaucgaggaguucugcaacagaagcugcgaggugcccaccagacugaacagcgccagccugaagcagcccuacaucacccagaacuacuuccccgugggcaccgugguggaguacgagugcagacccggcuacagaagagagcccagccugagccccaagcugaccugccugcagaaccugaaguggagcaccgccguggaguucugcaagaagaagagcugccccaaccccggcgagaucagaaacggccagaucgacgugcccggcggcauccuguucggcgccaccaucagcuucagcugcaacaccggcuacaagcuguucggcagcaccagcagcuucugccugaucagcggcagcagcgugcaguggagcgacccccugcccgagugcagagagaucuacugccccgcccccccccagaucgacaacggcaucauccagggcgagagagaccacuacggcuacagacagagcgugaccuacgccugcaacaagggcuucaccaugaucggcgagcacagcaucuacugcaccgugaacaacgacgagggcgaguggagcggccccccccccgagugcagaggcaagagccugaccagcaaggugccccccaccgugcagaagcccaccaccgugaacgugcccaccaccgaggugagccccaccagccagaagaccaccaccaagaccaccacccccaacgcccaggccaccagaagcacccccgugagcagaaccaccaagcacuuccacgagaccacccccaacaagggcagcggcaccaccagcggcaccaccagacugcugagcggccacaccugcuucacccugaccggccugcugggcacccuggugaccaugggccugcugaccuga

SEQ ID NO: 2603 - RNA, 2577 nt, Artificial Sequence
  CCDS73385.1 variant
augcugcagaccaaggaccugaucuggacccuguucuuccugggcaccgccgugagccugcagguggacaucgugcccagccagggcgagaucagcgugggcgagagcaaguucuuccugugccagguggccggcgacgccaaggacaaggacaucagcugguucagccccaacggcgagaagcugacccccaaccagcagagaaucagcgugguguggaacgacgacagcagcagcacccugaccaucuacaacgccaacaucgacgacgccggcaucuacaagugcguggugaccggcgaggacggcagcgagagcgaggccaccgugaacgugaagaucuuccagaagcugauguucaagaacgcccccaccccccaggaguucagagagggcgaggacgccgugaucgugugcgacguggugagcagccugccccccaccaucaucuggaagcacaagggcagagacgugauccugaagaaggacgugagauucaucgugcugagcaacaacuaccugcagaucagaggcaucaagaagaccgacgagggcaccuacagaugcgagggcagaauccuggccagaggcgagaucaacuucaaggacauccaggugaucgugaacgugccccccaccauccaggccagacagaacaucgugaacgccaccgccaaccugggccagagcgugacccuggugugcgacgccgagggcuuccccgagcccaccaugagcuggaccaaggacggcgagcagaucgagcaggaggaggacgacgagaaguacaucuucagcgacgacagcagccagcugaccaucaagaagguggacaagaacgacgaggccgaguacaucugcaucgccgagaacaaggccggcgagcaggacgccaccauccaccugaagguguucgccaagcccaagaucaccuacguggagaaccagaccgccauggagcuggaggagcaggugacccugaccugcgaggccagcggcgaccccauccccagcaucaccuggagaaccagcaccagaaacaucagcagcgaggagaaggccagcuggaccagacccgagaagcaggagacccuggacggccacaugguggugagaagccacgccagagugagcagccugacccugaagagcauccaguacaccgacgccggcgaguacaucugcaccgccagcaacaccaucggccaggacagccagagcauguaccuggaggugcaguacgcccccaagcugcagggccccguggccguguacaccugggagggcaaccaggugaacaucaccugcgagguguucgccuaccccagcgccaccaucagcugguucagagacggccagcugcugcccagcagcaacuacagcaacaucaagaucuacaacacccccagcgccagcuaccuggaggugacccccgacagcgagaacgacuucggcaacuacaacugcaccgccgugaacagaaucggccaggagagccuggaguucauccuggugcaggccgacacccccagcagccccagcaucgaccagguggagcccuacagcagcaccgcccaggugcaguucgacgagcccgaggccaccggcggcgugcccauccugaaguacaaggccgaguggagagccgugggcgaggagguguggcacagcaagugguacgacgccaaggaggccagcauggagggcaucgugaccaucgugggccugaagcccgagaccaccuacgccgugagacuggccgcccugaacggcaagggccugggcgagaucagcgccgccagcgaguucaagacccagcccgugcagggcgagcccagcgcccccaagcuggagggccagaugggcgaggacggcaacagcaucaaggugaaccugaucaagcaggacgacggcggcagccccaucagacacuaccuggugagauacagagcccugagcagcgaguggaagcccgagaucagacugcccagcggcagcgaccacgugaugcugaagagccuggacuggaacgccgaguacgagguguacgugguggccgagaaccagcagggcaagagcaaggccgcccacuucguguucagaaccagcgcccagcccaccgccauccccgccaacggcagccccaccagcggccugagcaccggcgccaucgugggcauccugaucgugaucuucgugcugcugcugguggugguggacaucaccugcuacuuccugaacaagugcggccuguucaugugcaucgccgugaaccugugcggcaaggccggccccggcgccaagggcaaggacauggaggagggcaaggccgccuucagcaaggacgagagcaaggagcccaucguggaggugagaaccgaggaggagagaacccccaaccacgacggcggcaagcacaccgagcccaacgagaccaccccccugaccgagcccgagaagggccccguggaggccaagcccgagugccaggagaccgagaccaagcccgcccccgccgaggugaagaccgugcccaacgacgccacccagaccaaggagaacgagagcaaggccuga

SEQ ID NO: 2604 - RNA, 867 nt, Artificial Sequence
  ABK41933 variant
augggccacaccagaagacagggcaccagccccagcaagugccccuaccugaacuucuuccagcugcuggugcuggccggccugagccacuucugcagcggcgugauccacgugaccaaggaggugaaggagguggccacccugagcugcggccacaacgugagcguggaggagcuggcccagaccagaaucuacuggcagaaggagaagaagauggugcugaccaugaugagcggcgacaugaacaucuggcccgaguacaagaacagaaccaucuucgacaucaccaacaaccugagcaucgugauccuggcccugagacccagcgacgagggcaccuacgagugcguggugcugaaguacgagaaggacgccuucaagagagagcaccuggccgaggugacccugagcgugaaggccgacuuccccacccccagcaucagcgacuucgagauccccaccagcaacaucagaagaaucaucugcagcaccagcggcggcuuccccgagccccaccugagcuggcuggagaacggcgaggagcugaacgccaucaacaccaccgugagccaggaccccgagaccgagcuguacgccgugagcagcaagcuggacuucaacaugaccaccaaccacagcuucaugugccugaucaaguacggccaccugagagugaaccagaccuucaacuggaacaccaccaagcaggagcacuuccccgacaaccugcugcccagcugggccaucacccugaucagcgugaacggcaucuucgugaucugcugccugaccuacugcuucgcccccagaugcagagagagaagaagaaacgagagacugagaagagagagcgugagacccguguga

SEQ ID NO: 2605 - RNA, 867 nt, Artificial Sequence; identical to SEQ ID NO: 2604
  AAA36045 variant

SEQ ID NO: 2606 - RNA, 990 nt, Artificial Sequence
  CCDS3009.1 variant
auggacccccagugcaccaugggccugagcaacauccuguucgugauggccuuccugcugagcggcgccgccccccugaagauccaggccuacuucaacgagaccgccgaccugcccugccaguucgccaacagccagaaccagagccugagcgagcuggugguguucuggcaggaccaggagaaccuggugcugaacgagguguaccugggcaaggagaaguucgacagcgugcacagcaaguacaugggcagaaccagcuucgacagcgacagcuggacccugagacugcacaaccugcagaucaaggacaagggccuguaccagugcaucauccaccacaagaagcccaccggcaugaucagaauccaccagaugaacagcgagcugagcgugcuggccaacuucagccagcccgagaucgugcccaucagcaacaucaccgagaacguguacaucaaccugaccugcagcagcauccacggcuaccccgagcccaagaagaugagcgugcugcugagaaccaagaacagcaccaucgaguacgacggcgugaugcagaagagccaggacaacgugaccgagcuguacgacgugagcaucagccugagcgugagcuuccccgacgugaccagcaacaugaccaucuucugcauccuggagaccgacaagaccagacugcugagcagccccuucagcaucgagcuggaggacccccagcccccccccgaccacauccccuggaucaccgccgugcugcccaccgugaucaucugcgugaugguguucugccugauccuguggaaguggaagaagaagaagagacccagaaacagcuacaagugcggcaccaacaccauggagagagaggagagcgagcagaccaagaagagagagaagauccacauccccgagagaagcgacgaggcccagagaguguucaagagcagcaagaccagcagcugcgacaagagcgacaccugcuucuga

SEQ ID NO: 2607 - RNA, 708 nt, Artificial Sequence
  AAA59674 variant
auggcccugcccgugaccgcccugcugcugccccuggcccugcugcugcacgccgccagacccagccaguucagagugagcccccuggacagaaccuggaaccugggcgagaccguggagcugaagugccaggugcugcugagcaaccccaccagcggcugcagcuggcuguuccagcccagaggcgccgccgccagccccaccuuccugcuguaccugagccagaacaagcccaaggccgccgagggccuggacacccagagauucagcggcaagagacugggcgacaccuucgugcugacccugagcgacuucagaagagagaacgagggcuacuacuucugcagcgcccugagcaacagcaucauguacuucagccacuucgugcccguguuccugcccgccaagcccaccaccacccccgcccccagaccccccacccccgcccccaccaucgccagccagccccugagccugagacccgaggccugcagacccgccgccggcggcgccgugcacaccagaggccuggacuucgccugcgacaucuacaucugggccccccuggccggcaccugcggcgugcugcugcugagccuggugaucacccuguacugcaaccacagaaacagaagaagagugugcaagugccccagacccguggugaagagcggcgacaagcccagccugagcgccagauacguguga

SEQ ID NO: 2608 - RNA, 2472 nt, Artificial Sequence
  EAW57688 variant
augaccgugcugcaggagcccgugcaggccgccaucuggcaggcccugaaccacuacgccuacagagacgccguguuccuggccgagagacuguacgccgaggugcacagcgaggaggcccuguuccugcuggccaccugcuacuacagaagcggcaaggccuacaaggccuacagacugcugaagggccacagcugcaccaccccccagugcaaguaccugcuggccaagugcugcguggaccugagcaagcuggccgagggcgagcagauccugagcggcggcguguucaacaagcagaagagccacgacgacaucgugaccgaguucggcgacagcgccugcuucacccugagccugcugggccacguguacugcaagaccgacagacuggccaagggcagcgagugcuaccagaagagccugagccugaaccccuuccuguggagccccuucgagagccugugcgagaucggcgagaagcccgaccccgaccagaccuucaaguucaccagccugcagaacuucagcaacugccugcccaacagcugcaccacccaggugcccaaccacagccugagccacagacagcccgagaccgugcugaccgagaccccccaggacaccaucgagcugaacagacugaaccuggagagcagcaacagcaaguacagccugaacaccgacagcagcgugagcuacaucgacagcgccgugaucagccccgacaccgugccccugggcaccggcaccagcauccugagcaagcaggugcagaacaagcccaagaccggcagaagccugcugggcggccccgccgcccugagcccccugacccccagcuucggcauccugccccuggagacccccagccccggcgacggcagcuaccugcagaacuacaccaacaccccccccgugaucgacgugcccagcaccggcgcccccagcaagaagagcguggccagaaucggccagaccggcaccaagagcguguucagccagagcggcaacagcagagaggugacccccauccuggcccagacccagagcagcggcccccagaccagcaccaccccccaggugcugagccccaccaucaccagcccccccaacgcccugcccagaagaagcagcagacuguucaccagcgacagcagcaccaccaaggagaacagcaagaagcugaagaugaaguucccccccaagauccccaacagaaagaccaagagcaagaccaacaagggcggcaucacccagcccaacaucaacgacagccuggagaucaccaagcuggacagcagcaucaucagcgagggcaagaucagcaccaucaccccccagauccaggccuucaaccugcagaaggccgccgccggccugaugagccugcugagagagaugggcaagggcuaccuggcccugugcagcuacaacugcaaggaggccaucaacauccugagccaccugcccagccaccacuacaacaccggcugggugcugugccagaucggcagagccuacuucgagcugagcgaguacaugcaggccgagagaaucuucagcgaggugagaagaaucgagaacuacagaguggagggcauggagaucuacagcaccacccuguggcaccugcagaaggacguggcccugagcgugcugagcaaggaccugaccgacauggacaagaacagccccgaggccuggugcgccgccggcaacugcuucagccugcagagagagcacgacaucgccaucaaguucuuccagagagccauccagguggaccccaacuacgccuacgccuacacccugcugggccacgaguucgugcugaccgaggagcuggacaaggcccuggccugcuucagaaacgccaucagagugaaccccagacacuacaacgccugguacggccugggcaugaucuacuacaagcaggagaaguucagccuggccgagaugcacuuccagaaggcccuggacaucaacccccagagcagcgugcugcugugccacaucggcguggugcagcacgcccugaagaagagcgagaaggcccuggacacccugaacaaggccaucgugaucgaccccaagaacccccugugcaaguuccacagagccagcgugcuguucgccaacgagaaguacaagagcgcccugcaggagcuggaggagcugaagcagaucgugcccaaggagagccugguguacuuccugaucggcaagguguacaagaagcugggccagacccaccuggcccugaugaacuucagcugggccauggaccuggaccccaagggcgccaacaaccagaucaaggaggccaucgacaagagauaccugcccgacgacgaggagcccaucacccaggaggagcagaucaugggcaccgacgagagccaggagagcagcaugaccgacgccgacgacacccagcugcacgccgccgagagcgacgaguucuga

SEQ ID NO: 2609 - RNA, 2475 nt, Artificial Sequence
  AAB34378 variant
augaccgugcugcaggagcccgugcaggccgccaucuggcaggcccugaaccacuacgccuacagagacgccguguuccuggccgagagacuguacgccgaggugcacagcgaggaggcccuguuccugcuggccaccugcuacuacagaagcggcaaggccuacaaggccuacagacugcugaagggccacagcugcaccaccccccagugcaaguaccugcuggccaagugcugcguggaccugagcaagcuggccgagggcgagcagauccugagcggcggcguguucaacaagcagaagagccacgacgacaucgugaccgaguucggcgacagcgccugcuucacccugagccugcugggccacguguacugcaagaccgacagacuggccaagggcagcgagugcuaccagaagagccugagccugaaccccuuccuguggagccccuucgagagccugugcgagaucggcgagaagcccgaccccgaccagaccuucaaguucaccagccugcagaacuucagcaacugccugcccaacagcugcaccacccaggugcccaaccacagccugagccacagacagcccgagaccgugcugaccgagaccccccaggacaccaucgagcugaacagacugaaccuggagagcagcaacagcaaguacagccugaacaccgacagcagcgugagcuacaucgacagcgccgugaucagccccgacaccgugccccugggcaccggcaccagcauccugagcaagcaggugcagaacaagcccaagaccggcagaagccugcugggcggccccgccgcccugagcccccugacccccagcuucggcauccugccccuggagacccccagccccggcgacggcagcuaccugcagaacuacaccaacaccccccccgugaucgacgugcccagcaccggcgcccccagcaagaagagcguggccagaaucggccagaccggcaccaagagcguguucagccagagcggcaacagcagagaggugacccccauccuggcccagacccagagcagcggcccccagaccagcaccaccccccaggugcugagccccaccaucaccagcccccccaacgcccugcccagaagaagcagcagacuguucaccagcgacagcagcaccaccaaggagaacagcaagaagcugaagaugaaguucccccccaagauccccaacagaaagaccaagagcaagaccaacaagggcggcaucacccagcccaacaucaacgacagccuggagaucaccaagcuggacagcagcaucaucagcgagggcaagaucagcaccaucaccccccagauccaggccuucaaccugcagaaggccgccgccgagggccugaugagccugcugagagagaugggcaagggcuaccuggcccugugcagcuacaacugcaaggaggccaucaacauccugagccaccugcccagccaccacuacaacaccggcugggugcugugccagaucggcagagccuacuucgagcugagcgaguacaugcaggccgagagaaucuucagcgaggugagaagaaucgagaacuacagaguggagggcauggagaucuacagcaccacccuguggcaccugcagaaggacguggcccugagcgugcugagcaaggaccugaccgacauggacaagaacagccccgaggccuggugcgccgccggcaacugcuucagccugcagagagagcacgacaucgccaucaaguucuuccagagagccauccagguggaccccaacuacgccuacgccuacacccugcugggccacgaguucgugcugaccgaggagcuggacaaggcccuggccugcuucagaaacgccaucagagugaaccccagacacuacaacgccugguacggccugggcaugaucuacuacaagcaggagaaguucagccuggccgagaugcacuuccagaaggcccuggacaucaacccccagagcagcgugcugcugugccacaucggcguggugcagcacgcccugaagaagagcgagaaggcccuggacacccugaacaaggccaucgugaucgaccccaagaacccccugugcaaguuccacagagccagcgugcuguucgccaacgagaaguacaagagcgcccugcaggagcuggaggagcugaagcagaucgugcccaaggagagccugguguacuuccugaucggcaagguguacaagaagcugggccagacccaccuggcccugaugaacuucagcugggccauggaccuggaccccaagggcgccaacaaccagaucaaggaggccaucgacaagagauaccugcccgacgacgaggagcccaucacccaggaggagcagaucaugggcaccgacgagagccaggagagcagcaugaccgacgccgacgacacccagcugcacgccgccgagagcgacgaguucuga

SEQ ID NO: 2610 - RNA, 1788 nt, Artificial Sequence
  AAA51947 variant
augagagugcugcuggccgcccugggccugcuguuccugggcgcccugagagccuucccccaggacagacccuucgaggacaccugccacggcaaccccagccacuacuacgacaaggccgugagaagaugcugcuacagaugccccaugggccuguuccccacccagcagugcccccagagacccaccgacugcagaaagcagugcgagcccgacuacuaccuggacgaggccgacagaugcaccgccugcgugaccugcagcagagacgaccugguggagaagacccccugcgccuggaacagcagcagagugugcgagugcagacccggcauguucugcagcaccagcgccgugaacagcugcgccagaugcuucuuccacagcgugugccccgccggcaugaucgugaaguuccccggcaccgcccagaagaacaccgugugcgagcccgccagccccggcgugagccccgccugcgccagccccgagaacugcaaggagcccagcagcggcaccaucccccaggccaagcccacccccgugagccccgccaccagcagcgccagcaccaugcccgugagaggcggcaccagacuggcccaggaggccgccagcaagcugaccagagcccccgacagccccagcagcgugggcagacccagcagcgaccccggccugagccccacccagcccugccccgagggcagcggcgacugcagaaagcagugcgagcccgacuacuaccuggacgaggccggcagaugcaccgccugcgugagcugcagcagagacgaccugguggagaagacccccugcgccuggaacagcagcagaaccugcgagugcagacccggcaugaucugcgccaccagcgccaccaacagcugcgccagaugcgugcccuaccccaucugcgccgccgagaccgugaccaagccccaggacauggccgagaaggacaccaccuucgaggcccccccccugggcacccagcccgacugcaaccccacccccgagaacggcgaggcccccgccagcaccagccccacccagagccugcugguggacagccaggccagcaagacccugcccauccccaccagcgcccccguggcccugagcagcaccggcaagcccgugcuggacgccggccccgugcuguucugggugauccuggugcugguggugguggugggcagcagcgccuuccugcugugccacagaagagccugcagaaagagaaucagacagaagcugcaccugugcuaccccgugcagaccagccagcccaagcuggagcugguggacagcagacccagaagaagcagcacccagcugagaagcggcgccagcgugaccgagcccguggccgaggagagaggccugaugagccagccccugauggagaccugccacagcgugggcgccgccuaccuggagagccugccccugcaggacgccagccccgccggcggccccagcagccccagagaccugcccgagcccagagugagcaccgagcacaccaacaacaagaucgagaagaucuacaucaugaaggccgacaccgugaucgugggcaccgugaaggccgagcugcccgagggcagaggccuggccggccccgccgagcccgagcuggaggaggagcuggaggccgaccacaccccccacuaccccgagcaggagaccgagcccccccugggcagcugcagcgacgugaugcugagcguggaggaggagggcaaggaggacccccugcccaccgccgccagcggcaaguga

SEQ ID NO: 2611 - RNA, 912 nt, Artificial Sequence
  EAW97060 variant
auggccaccagcagauacgagcccguggccgagaucggcgugggcgccuacggcaccguguacaaggccagagacccccacagcggccacuucguggcccugaagagcgugagagugcccaacggcggcggcggcggcggcggccugcccaucagcaccgugagagagguggcccugcugagaagacuggaggccuucgagcaccccaacguggugagacugauggacgugugcgccaccagcagaaccgacagagagaucaaggugacccugguguucgagcacguggaccaggaccugagaaccuaccuggacaaggcccccccccccggccugcccgccgagaccaucaaggaccugaugagacaguuccugagaggccuggacuuccugcacgccaacugcaucgugcacagagaccugaagcccgagaacauccuggugaccagcggcggcaccgugaagcuggccgacuucggccuggccagaaucuacagcuaccagauggcccugacccccgugguggugacccugugguacagagcccccgaggugcugcugcagagcaccuacgccacccccguggacauguggagcgugggcugcaucuucgccgagauguucagaagaaagccccuguucugcggcaacagcgaggccgaccagcugggcaagaucuucgaccugaucggccugccccccgaggacgacuggcccagagacgugagccugcccagaggcgccuucccccccagaggccccagacccgugcagagcguggugcccgagauggaggagagcggcgcccagcugcugcuggagaugcugaccuucaacccccacaagagaaucagcgccuucagagcccugcagcacagcuaccugcacaaggacgagggcaaccccgaguga

SEQ ID NO: 2612 - RNA, 912 nt, Artificial Sequence; identical to SEQ ID NO: 2611
  AAA35673 variant

SEQ ID NO: 2613 - RNA, 690 nt, Artificial Sequence
  AAB50213 variant
auggacgugugcgccaccagcagaaccgacagagagaucaaggugacccugguguucgagcacguggaccaggaccugagaaccuaccuggacaaggcccccccccccggccugcccgccgagaccaucaaggaccugaugagacaguuccugagaggccuggacuuccugcacgccaacugcaucgugcacagagaccugaagcccgagaacauccuggugaccagcggcggcaccgugaagcuggccgacuucggccuggccagaaucuacagcuaccagauggcccugacccccgugguggugacccugugguacagagcccccgaggugcugcugcagagcaccuacgccacccccguggacauguggagcgugggcugcaucuucgccgagauguucagaagaaagccccuguucugcggcaacagcgaggccgaccagcugggcaagaucuucgaccugaucggccugccccccgaggacgacuggcccagagacgugagccugcccagaggcgccuucccccccagaggccccagacccgugcagagcguggugcccgagauggaggagagcggcgcccagcugcugcuggagaugcugaccuucaacccccacaagagaaucagcgccuucagagcccugcagcacagcuaccugcacaaggacgagggcaaccccgaguga

SEQ ID NO: 2614 - RNA, 336 nt, Artificial Sequence
  AAH15669 variant
auggccaccagcagauacgagcccguggccgagaucggcgugggcgccuacggcaccguguacaaggccagagacccccacagcggccacuucguggcccugaagagcgugagagugcccaacggcggcggcggcggcggcggccugcccaucagcaccgugagagagguggcccugcugagaagacuggaggccuucgagcaccccaacguggugagacugauggacgugugcgccaccagcagaaccgacagagagaucaagagaugcuucguggagagccugagcagcguggagacccugaagcccaccagcugggccaagagccugaccuga

SEQ ID NO: 2615 - RNA, 429 nt, Artificial Sequence
  ACY78326 variant
auggagcccgccgccggcagcagcauggagcccagcgccgacuggcuggccaccgccgccgccagaggcagaguggaggaggugagagcccugcuggaggccggcgcccugcccaacgcccccaacagcuacggcagaagacccauccaggugaugaugaugggcagcgccagaguggccgagcugcugcugcugcacggcgccgagcccaacugcgccgaccccgccacccugaccagacccgugcacgacgccgccagagagggcuuccuggacacccugguggugcugcacagagccggcgcccccugcgccaugcccggcgccgugugccccuggaccuggcugagaagcugggccaucgccaugagccacggcaccugcgccagacugagaggcgcccccgaggccgugaccaugcccgccuga

SEQ ID NO: 2616 - RNA, 351 nt, Artificial Sequence
  EAW58598 variant
auggagcccgccgccggcagcagcauggagcccagcgccgacuggcuggccaccgccgccgccagaggcagaguggaggaggugagagcccugcuggaggccggcgcccugcccaacgcccccaacagcuacggcagaagacccauccaggugggcagaggcagcgccgccggcgccggcgacggcggcagacuguggagaaccaaguucgccggcgagcuggagagcggcagcgccagcauccugagaaagaagggcagacugcccggcgaguucagcgagggcgugugcaaccacagacccccccccggcgacgcccugggcgccugggaggccaaggaggaggaguga

SEQ ID NO: 2617 - RNA, 471 nt, Artificial Sequence
  AFN61598 variant
auggagcccgccgccggcagcagcauggagcccagcgccgacuggcuggccaccgccgccgccagaggcagaguggaggaggugagagcccugcuggaggccggcgcccugcccaacgcccccaacagcuacggcagaagacccauccaggugaugaugaugggcagcgccagaguggccgagcugcugcugcugcacggcgccgagcccaacugcgccgaccccgccacccugaccagacccgugcacgacgccgccagagagggcuuccuggacacccugguggugcugcacagagccggcgccagacuggacgugagagacgccuggggcagacugcccguggaccuggccgaggagcugggccacagagacguggccagauaccugagagccgccgccggcggcaccagaggcagcaaccacgccagaaucgacgccgccgagggccccagcgacauccccgacuga

SEQ ID NO: 2618 - RNA, 327 nt, Artificial Sequence
  CCQ43815 variant
auggaggugaugaugaugggcagcgccagaguggccgagcugcugcugcugcacggcgccgagcccaacugcgccgaccccgccacccugaccagacccgugcacgacgccgccagagagggcuuccuggacacccugguggugcugcacagagccggcgccagacuggacgugagagacgccuggggcagacugcccguggaccuggccgaggagcugggccacagagacguggccagauaccugagagccgccgccggcggcaccagaggcagcaaccacgccagaaucgacgccgccgagggccccagcgacauccccgacuga

SEQ ID NO: 2619 - RNA, 399 nt, Artificial Sequence
  AAA82236 variant
auggugagaagauuccuggugacccugagaaucagaagagccugcggcccccccagagugagaguguucguggugcacauccccagacugaccggcgagugggccgcccccggcgcccccgccgccguggcccuggugcugaugcugcugagaagccagagacugggccagcagccccugcccagaagacccggccacgacgacggccagagacccagcggcggcgccgccgccgcccccagaagaggcgcccagcugagaagacccagacacagccaccccaccagagccagaagaugccccggcggccugcccggccacgccggcggcgccgcccccggcagaggcgccgccggcagagccagaugccugggccccagcgccagaggccccggcuga

SEQ ID NO: 2620 - RNA, 2109 nt, Artificial Sequence
  CCDS12584.1 variant
auggagagccccagcgcccccccccacagauggugcauccccuggcagagacugcugcugaccgccagccugcugaccuucuggaacccccccaccaccgccaagcugaccaucgagagcacccccuucaacguggccgagggcaaggaggugcugcugcuggugcacaaccugccccagcaccuguucggcuacagcugguacaagggcgagagaguggacggcaacagacagaucaucggcuacgugaucggcacccagcaggccacccccggccccgccuacagcggcagagagaucaucuaccccaacgccagccugcugauccagaacaucauccagaacgacaccggcuucuacacccugcacgugaucaagagcgaccuggugaacgaggaggccaccggccaguucagaguguaccccgagcugcccaagcccagcaucagcagcaacaacagcaagcccguggaggacaaggacgccguggccuucaccugcgagcccgagacccaggacgccaccuaccuguggugggugaacaaccagagccugcccgugagccccagacugcagcugagcaacggcaacagaacccugacccuguucaacgugaccagaaacgacaccgccagcuacaagugcgagacccagaaccccgugagcgccagaagaagcgacagcgugauccugaacgugcuguacggccccgacgcccccaccaucagcccccugaacaccagcuacagaagcggcgagaaccugaaccugagcugccacgccgccagcaacccccccgcccaguacagcugguucgugaacggcaccuuccagcagagcacccaggagcuguucauccccaacaucaccgugaacaacagcggcagcuacaccugccaggcccacaacagcgacaccggccugaacagaaccaccgugaccaccaucaccguguacgccgagccccccaagcccuucaucaccagcaacaacagcaaccccguggaggacgaggacgccguggcccugaccugcgagcccgagauccagaacaccaccuaccuguggugggugaacaaccagagccugcccgugagccccagacugcagcugagcaacgacaacagaacccugacccugcugagcgugaccagaaacgacgugggccccuacgagugcggcauccagaacgagcugagcguggaccacagcgaccccgugauccugaacgugcuguacggccccgacgaccccaccaucagccccagcuacaccuacuacagacccggcgugaaccugagccugagcugccacgccgccagcaacccccccgcccaguacagcuggcugaucgacggcaacauccagcagcacacccaggagcuguucaucagcaacaucaccgagaagaacagcggccuguacaccugccaggccaacaacagcgccagcggccacagcagaaccaccgugaagaccaucaccgugagcgccgagcugcccaagcccagcaucagcagcaacaacagcaagcccguggaggacaaggacgccguggccuucaccugcgagcccgaggcccagaacaccaccuaccuguggugggugaacggccagagccugcccgugagccccagacugcagcugagcaacggcaacagaacccugacccuguucaacgugaccagaaacgacgccagagccuacgugugcggcauccagaacagcgugagcgccaacagaagcgaccccgugacccuggacgugcuguacggccccgacacccccaucaucagcccccccgacagcagcuaccugagcggcgccaaccugaaccugagcugccacagcgccagcaaccccagcccccaguacagcuggagaaucaacggcaucccccagcagcacacccaggugcuguucaucgccaagaucacccccaacaacaacggcaccuacgccugcuucgugagcaaccuggccaccggcagaaacaacagcaucgugaagagcaucaccgugagcgccagcggcaccagccccggccugagcgccggcgccaccgugggcaucaugaucggcgugcuggugggcguggcccugaucuga

SEQ ID NO: 2621 - RNA, 1035 nt, Artificial Sequence
  AAA51739 variant
augggcccccccagcgccccccccugcagacugcacgugcccuggaaggaggugcugcugaccgccagccugcugaccuucuggaacccccccaccaccgccaagcugaccaucgagagcacccccuucaacguggccgagggcaaggaggugcugcugcuggcccacaaccugccccagaacagaaucggcuacagcugguacaagggcgagagaguggacggcaacagccugaucgugggcuacgugaucggcacccagcaggccacccccggccccgccuacagcggcagagagaccaucuaccccaacgccagccugcugauccagaacgugacccagaacgacaccggcuucuacacccugcaggugaucaagagcgaccuggugaacgaggaggccaccggccaguuccacguguaccccgagcugcccaagcccagcaucagcagcaacaacagcaaccccguggaggacaaggacgccguggccuucaccugcgagcccgaggugcagaacaccaccuaccuguggugggugaacggccagagccugcccgugagccccagacugcagcugagcaacggcaacaugacccugacccugcugagcgugaagagaaacgacgccggcagcuacgagugcgagauccagaaccccgccagcgccaacagaagcgaccccgugacccugaacgugcuguacggccccgacggccccaccaucagccccagcaaggccaacuacagacccggcgagaaccugaaccugagcugccacgccgccagcaacccccccgcccaguacagcugguucaucaacggcaccuuccagcagagcacccaggagcuguucauccccaacaucaccgugaacaacagcggcagcuacaugugccaggcccacaacagcgccaccggccugaacagaaccaccgugaccaugaucaccgugagcggcagcgcccccgugcugagcgccguggccaccgugggcaucaccaucggcgugcuggccagaguggcccugaucuga

SEQ ID NO: 2622 - RNA, 1173 nt, Artificial Sequence
  AAB04533 variant
augggcgccaccaccauggaccagaagagccugugggccggcgugguggugcugcugcugcugcagggcggcagcgccuacaagcuggugugcuacuucaccaacuggagccaggacagacaggagcccggcaaguucacccccgagaacaucgaccccuuccugugcagccaccugaucuacagcuucgccagcaucgagaacaacaaggugaucaucaaggacaagagcgaggugaugcuguaccagaccaucaacagccugaagaccaagaaccccaagcugaagauccugcugagcaucggcggcuaccuguucggcagcaagggcuuccaccccaugguggacagcagcaccagcagacuggaguucaucaacagcaucauccuguuccugagaaaccacaacuucgacggccuggacgugagcuggaucuaccccgaccagaaggagaacacccacuucaccgugcugauccacgagcuggccgaggccuuccagaaggacuucaccaagagcaccaaggagagacugcugcugaccgccggcgugagcgccggcagacagaugaucgacaacagcuaccagguggagaagcuggccaaggaccuggacuucaucaaccugcugagcuucgacuuccacggcagcugggagaagccccugaucaccggccacaacagcccccugagcaagggcuggcaggacagaggccccagcagcuacuacaacguggaguacgccgugggcuacuggauccacaagggcaugcccagcgagaagguggugaugggcauccccaccuacggccacagcuucacccuggccagcgccgagaccaccgugggcgcccccgccagcggccccggcgccgccggccccaucaccgagagcagcggcuuccuggccuacuacgagaucugccaguuccugaagggcgccaagaucaccagacugcaggaccagcaggugcccuacgccgugaagggcaaccagugggugggcuacgacgacgugaagagcauggagaccaaggugcaguuccugaagaaccugaaccugggcggcgccaugaucuggagcaucgacauggacgacuucaccggcaagagcugcaaccagggccccuacccccuggugcaggccgugaagagaagccugggcagccuguga

SEQ ID NO: 2623 - RNA, 2832 nt, Artificial Sequence
  AAD40367 variant
augacccagagaagcaucgccggccccaucugcaaccugaaguucgugacccugcugguggcccugagcagcgagcugcccuuccugggcgccggcgugcagcugcaggacaacggcuacaacggccugcugaucgccaucaacccccaggugcccgagaaccagaaccugaucagcaacaucaaggagaugaucaccgaggccagcuucuaccuguucaacgccaccaagagaagaguguucuucagaaacaucaagauccugauccccgccaccuggaaggccaacaacaacagcaagaucaagcaggagagcuacgagaaggccaacgugaucgugaccgacugguacggcgcccacggcgacgaccccuacacccugcaguacagaggcugcggcaaggagggcaaguacauccacuucacccccaacuuccugcugaacgacaaccugaccgccggcuacggcagcagaggcagaguguucgugcacgagugggcccaccugagauggggcguguucgacgaguacaacaacgacaagcccuucuacaucaacggccagaaccagaucaaggugaccagaugcagcagcgacaucaccggcaucuucgugugcgagaagggccccugcccccaggagaacugcaucaucagcaagcuguucaaggagggcugcaccuucaucuacaacagcacccagaacgccaccgccagcaucauguucaugcagagccugagcagcgugguggaguucugcaacgccagcacccacaaccaggaggcccccaaccugcagaaccagaugugcagccugagaagcgccugggacgugaucaccgacagcgccgacuuccaccacagcuuccccaugaacggcaccgagcugccccccccccccaccuucagccuggugcaggccggcgacaagguggugugccuggugcuggacgugagcagcaagauggccgaggccgacagacugcugcagcugcagcaggccgccgaguucuaccugaugcagaucguggagauccacaccuucgugggcaucgccagcuucgacagcaagggcgagaucagagcccagcugcaccagaucaacagcaacgacgacagaaagcugcuggugagcuaccugcccaccaccgugagcgccaagaccgacaucagcaucugcagcggccugaagaagggcuucgaggugguggagaagcugaacggcaaggccuacggcagcgugaugauccuggugaccagcggcgacgacaagcugcugggcaacugccugcccaccgugcugagcagcggcagcaccauccacagcaucgcccugggcagcagcgccgcccccaaccuggaggagcugagcagacugaccggcggccugaaguucuucgugcccgacaucagcaacagcaacagcaugaucgacgccuucagcagaaucagcagcggcaccggcgacaucuuccagcagcacauccagcuggagagcaccggcgagaacgugaagccccaccaccagcugaagaacaccgugaccguggacaacaccgugggcaacgacaccauguuccuggugaccuggcaggccagcggcccccccgagaucauccuguucgaccccgacggcagaaaguacuacaccaacaacuucaucaccaaccugaccuucagaaccgccagccuguggauccccggcaccgccaagcccggccacuggaccuacacccugaacaacacccaccacagccugcaggcccugaaggugaccgugaccagcagagccagcaacagcgccgugccccccgccaccguggaggccuucguggagagagacagccugcacuucccccaccccgugaugaucuacgccaacgugaagcagggcuucuaccccauccugaacgccaccgugaccgccaccguggagcccgagaccggcgaccccgugacccugagacugcuggacgacggcgccggcgccgacgugaucaagaacgacggcaucuacagcagauacuucuucagcuucgccgccaacggcagauacagccugaaggugcacgugaaccacagccccagcaucagcacccccgcccacagcauccccggcagccacgccauguacgugcccggcuacaccgccaacggcaacauccagaugaacgcccccagaaagagcgugggcagaaacgaggaggagagaaaguggggcuucagcagagugagcagcggcggcagcuucagcgugcugggcgugcccgccggcccccaccccgacguguucccccccugcaagaucaucgaccuggaggccgugaagguggaggaggagcugacccugagcuggaccgcccccggcgaggacuucgaccagggccaggccaccagcuacgagaucagaaugagcaagagccugcagaacauccaggacgacuucaacaacgccauccuggugaacaccagcaagagaaacccccagcaggccggcaucagagagaucuucaccuucagcccccagaucagcaccaacggccccgagcaccagcccaacggcgagacccacgagagccacagaaucuacguggccaucagagccauggacagaaacagccugcagagcgccgugagcaacaucgcccaggccccccuguucaucccccccaacagcgaccccgugcccgccagagacuaccugauccugaagggcgugcugaccgccaugggccugaucggcaucaucugccugaucaucguggugacccaccacacccugagcagaaagaagagagccgacaagaaggagaacggcaccaagcugcuguga

SEQ ID NO: 2624 - RNA, 708 nt, Artificial Sequence
  AAF82135 variant
auggaggaggagacccacaccgacgccaagaucagagccgagaacggcaccggcagcagccccagaggccccggcugcagccugagacacuucgccugcgagcagaaccugcugagcagacccgacggcagcgccagcuuccugcagggcgacaccagcgugcuggccggcguguacggccccgccgaggugaaggugagcaaggagaucuucaacaaggccacccuggaggugauccugagacccaagaucggccugcccggcguggccgagaagagcagagagagacugaucagaaacaccugcgaggccguggugcugggcacccugcaccccagaaccagcaucaccguggugcugcagguggugagcgacgccggcagccugcuggccugcugccugaacgccgccugcauggcccugguggacgccggcgugcccaugagagcccuguucugcggcguggccugcgcccuggacagcgacggcacccuggugcuggaccccaccagcaagcaggagaaggaggccagagccgugcugaccuucgcccuggacagcguggagagaaagcugcugaugagcagcaccaagggccuguacagcgacaccgagcugcagcagugccuggccgccgcccaggccgccagccagcacguguucagauucuacagagagagccugcagagaagauacagcaagagcuga

SEQ ID NO: 2625 - RNA, 1752 nt, Artificial Sequence
  CCDS6312.1 variant
auggagguggccgccaacugcagccugagagugaagagaccccugcuggaccccagauucgagggcuacaagcugagccuggagccccugcccugcuaccagcuggagcuggacgccgccguggccgaggugaagcugagagacgaccaguacacccuggagcacaugcacgccuucggcauguacaacuaccugcacugcgacagcugguaccaggacagcguguacuacaucgacacccugggcagaaucaugaaccugaccgugaugcuggacaccgcccugggcaagcccagagagguguucagacugcccaccgaccugaccgccugcgacaacagacugugcgccagcauccacuucagcagcagcaccugggugacccugagcgacggcaccggcagacuguacgugaucggcaccggcgagagaggcaacagcgccagcgagaagugggagaucauguucaacgaggagcugggcgaccccuucaucaucauccacagcaucagccugcugaacgccgaggagcacagcaucgccacccugcugcugagaaucgagaaggaggagcuggacaugaagggcagcggcuucuacgugagccuggagugggugaccaucagcaagaagaaccaggacaacaagaaguacgagaucaucaagagagacauccugagaggcaagagcgugccccacuacgccgccaucgagcccgacggcaacggccugaugaucgugagcuacaagagccugaccuucgugcaggccggccaggaccuggaggagaacauggacgaggacaucagcgagaagaucaaggagccccuguacuacuggcagcagaccgaggacgaccugaccgugaccaucagacugcccgaggacagcaccaaggaggacauccagauccaguuccugcccgaccacaucaacaucgugcugaaggaccaccaguuccuggagggcaagcuguacagcagcaucgaccacgagagcagcaccuggaucaucaaggagagcaacagccuggagaucagccugaucaagaagaacgagggccugaccuggcccgagcuggugaucggcgacaagcagggcgagcugaucagagacagcgcccagugcgccgccaucgccgagagacugaugcaccugaccagcgaggagcugaaccccaaccccgacaaggagaagccccccugcaacgcccaggagcuggaggagugcgacaucuucuucgaggagagcagcagccugugcagauucgacggcaacacccugaagaccacccacguggugaaccugggcagcaaccaguaccuguucagcgugaucguggaccccaaggagaugcccugcuucugccugagacacgacguggacgcccugcuguggcagccccacagcagcaagcaggacgacaugugggagcacaucgccaccuucaacgcccugggcuacgugcaggccagcaagagagacaagaaguucuucgccugcgcccccaacuacagcuacgccgcccugugcgagugccugagaagaguguucaucuacagacagcccgcccccaugagcaccgugcuguacaacagaaaggagggcagacaggugggccagguggccaagcagcagguggccagccuggagaccaacgaccccauccugggcuuccaggccaccaacgagagacuguucgugcugaccaccaagaaccuguuccugaucaaggugaacaccgagaacuga

SEQ ID NO: 2626 - RNA, 1563 nt, Artificial Sequence
  CCDS41288.1 variant
augagcagcccccuggccagccugagcaagaccagaaaggugccccugcccagcgagcccaugaaccccggcagaagaggcaucagaaucuacggcgacgaggacgagguggacaugcugagcgacggcugcggcagcgaggagaagaucagcgugcccagcugcuacggcggcaucggcgcccccgugagcagacaggugcccgccagccacgacagcgagcugauggccuucaugaccagaaagcugugggaccuggagcagcaggugaaggcccagaccgacgagauccugagcaaggaccagaagaucgccgcccuggaggaccuggugcagacccugagaccccaccccgccgaggccacccugcagagacaggaggagcuggagaccaugugcgugcagcugcagagacaggugagagagauggagagauuccugagcgacuacggccugcagugggugggcgagcccauggaccaggaggacagcgagagcaagaccgugagcgagcacggcgagagagacuggaugaccgccaagaaguucuggaagcccggcgacagccuggccccccccgagguggacuucgacagacugcuggccagccugcaggaccugagcgagcuggugguggagggcgacacccaggugacccccgugcccggcggcgccagacugagaacccuggagcccaucccccugaagcuguacagaaacggcaucaugauguucgacggccccuuccagcccuucuacgaccccagcacccagagaugccugagagacauccuggacggcuucuuccccagcgagcugcagagacuguaccccaacggcgugcccuucaaggugagcgaccugagaaaccagguguaccuggaggacggccuggaccccuuccccggcgagggcagaguggugggcagacagcugaugcacaaggcccuggacagaguggaggagcaccccggcagcagaaugaccgccgagaaguuccugaacagacugcccaaguucgugaucagacagggcgaggugaucgacaucagaggccccaucagagacacccugcagaacugcugcccccugcccgccagaauccaggagaucgugguggagacccccacccuggccgccgagagagagagaagccaggagagccccaacacccccgcccccccccugagcaugcugagaaucaagagcgagaacggcgagcaggccuuccugcugaugaugcagcccgacaacaccaucggcgacgugagagcccugcuggcccaggccagagugauggacgccagcgccuucgagaucuucagcaccuucccccccacccuguaccaggacgacacccugacccugcaggccgccggccuggugcccaaggccgcccugcugcugagagccagaagagcccccaagagcagccugaaguucagccccggccccugccccggccccggccccggccccagccccggccccggccccggccccagccccggccccggccccggccccagccccugccccggccccagccccagcccccaguga

SEQ ID NO: 2627 - RNA, 429 nt, Artificial Sequence
  AAA88022 variant
auggccaccaagaucgacaaggaggccugcagagccgccuacaaccuggugagagacgacggcagcgccgugaucugggugaccuucaaguacgacggcagcaccaucgugcccggcgagcagggcgccgaguaccagcacuucauccagcagugcaccgacgacgugagacuguucgccuucgugagauucaccaccggcgacgccaugagcaagagaagcaaguucgcccugaucaccuggaucggcgagaacgugagcggccugcagagagccaagaccggcaccgacaagacccuggugaaggagguggugcagaacuucgccaaggaguucgugaucagcgacagaaaggagcuggaggaggacuucaucaagagcgagcugaagaaggccggcggcgccaacuacgacgcccagaccgaguga

SEQ ID NO: 2628 - RNA, 495 nt, Artificial Sequence
  CCQ43891 variant
auggccaccagagaccccuggguguggauggccagccccgacuuccaggccagaaagggcaagagagugcaccaggagacccuggcccccggcgagaccaaggacaagauggagcugcugggccugagaggcccccuggaccugcugggccccggcgcccugcuggccacccugggcaagauggcccccggcgagcacaaggcccagagagcccccaaggagagccccgacaagaccgccagaugggcccagagagacccccagggccccagagugagccuggaguaccuggagagaagagccaccaugggccaccaggccagccuggaccaccagggccccagagccagccagggcgccuggggccugggcgagagaaccguguggaccgugccccaggacagaagaggcagccuggccaccgaggccagaauggagcugcagggccccggcgugccccaggccagcagagccagcagagagacccagugguga

SEQ ID NO: 2629 - RNA, 1623 nt, Artificial Sequence
  AAO18361 variant
augggccccggcgagagagccggcggcggcggcgacgccggcaagggcaacgccgccggcggcggcggcggcggcagaagcgccaccaccgccggcagcagagccgugagcgcccugugccugcugcugagcgugggcagcgccgccgccugccugcugcugggcgugcaggccgccgcccugcagggcagaguggccgcccuggaggaggagagagagcugcugagaagagccggcccccccggcgcccuggacgccugggccgagccccaccuggagagacugcugagagagaagcuggacggccuggccaagaucagaaccgccagagaggcccccagcgagugcgugugcccccccggcccccccggcagaagaggcaagcccggcagaagaggcgaccccggcccccccggccagagcggcagagacggcuaccccggcccccugggccuggacggcaagcccggccugcccggccccaagggcgagaagggcgcccccggcgacuucggccccagaggcgaccagggccaggacggcgccgccggcccccccggcccccccggcccccccggcgccagaggcccccccggcgacaccggcaaggacggccccagaggcgcccagggccccgccggccccaagggcgagcccggccaggacggcgagaugggccccaagggcccccccggccccaagggcgagcccggcgugcccggcaagaagggcgacgacggcacccccagccagcccggcccccccggccccaagggcgagcccggcagcaugggccccagaggcgagaacggcguggacggcgcccccggccccaagggcgagcccggccacagaggcaccgacggcgccgccggccccagaggcgcccccggccugaagggcgagcagggcgacaccguggugaucgacuacgacggcagaauccuggacgcccugaagggcccccccggcccccagggcccccccggcccccccggcauccccggcgccaagggcgagcugggccugcccggcgcccccggcaucgacggcgagaagggccccaagggccagaagggcgaccccggcgagcccggccccgccggccugaagggcgaggccggcgagaugggccugagcggccugcccggcgccgacggccugaagggcgagaagggcgagagcgccagcgacagccugcaggagagccuggcccagcugaucguggagcccggcccccccggcccccccggcccccccggccccaugggccugcagggcauccagggccccaagggccuggacggcgccaagggcgagaagggcgccagcggcgagagaggccccagcggccugcccggccccgugggcccccccggccugaucggccugcccggcaccaagggcgagaagggcagacccggcgagcccggccuggacggcuuccccggccccagaggcgagaagggcgacagaagcgagagaggcgagaagggcgagagaggcgugcccggcagaaagggcgugaagggccagaagggcgagcccggcccccccggccuggaccagcccugccccgugggccccgacggccugcccgugcccggcugcuggcacaaguga

SEQ ID NO: 2630 - RNA, 492 nt, Artificial Sequence
  CAG25548 variant
augcuggccagagcccugcugcugugcgccgugcuggcccugagccacaccgccaaccccugcugcagccaccccugccagaacagaggcgugugcaugagcgugggcuucgaccaguacaagugcgacugcaccagaaccggcuucuacggcgagaacugcagcacccccgaguuccugaccagaaucaagcuguuccugaagcccacccccaacaccgugcacuacauccugacccacuucaagggcuucuggaacguggugaacaacauccccuuccugagaaacgccaucaugagcuacgugcugaccagcagaagccaccugaucgacagcccccccaccuacaacgccgacuacggcuacaagagcugggaggccuucagcaaccugagcuacuacaccagagcccugccccccgugcccgacgacugccccaccccccugggcgugaaggcccugcacgccagcguguuccaggacagaagcuga

SEQ ID NO: 2631 - RNA, 1632 nt, Artificial Sequence
  AAC50809 variant
augggcaccagccugagccccaacgaccccuggccccugaacccccugagcauccagcagaccacccugcugcugcugcugagcgugcuggccaccgugcacgugggccagagacugcugagacagagaagaagacagcugagaagcgccccccccggccccuucgccuggccccugaucggcaacgccgccgccgugggccaggccgcccaccugagcuucgccagacuggccagaagauacggcgacguguuccagaucagacugggcagcugccccaucguggugcugaacggcgagagagccauccaccaggcccuggugcagcagggcagcgccuucgccgacagacccgccuucgccagcuucagaguggugagcggcggcagaagcauggccuucggccacuacagcgagcacuggaaggugcagagaagagccgcccacagcaugaugagaaacuucuucaccagacagcccagaagcagacaggugcuggagggccacgugcugagcgaggccagagagcugguggcccugcuggugagaggcagcgccgacggcgccuuccuggaccccagaccccugaccgugguggccguggccaacgugaugagcgccgugugcuucggcugcagauacagccacgacgaccccgaguucagagagcugcugagccacaacgaggaguucggcagaaccgugggcgccggcagccugguggacgugaugcccuggcugcaguacuuccccaaccccgugagaaccguguucagagaguucgagcagcugaacagaaacuucagcaacuucauccuggacaaguuccugagacacugcgagagccugagacccggcgccgcccccagagacaugauggacgccuucauccugagcgccgagaagaaggccgccggcgacagccacggcggcggcgccagacuggaccuggagaacgugcccgccaccaucaccgacaucuucggcgccagccaggacacccugagcaccgcccugcaguggcugcugcugcuguucaccagauaccccgacgugcagaccagagugcaggccgagcuggaccagguggugggcagagacagacugcccugcaugggcgaccagcccaaccugcccuacgugcuggccuuccuguacgaggccaugagauucagcagcuucgugcccgugaccaucccccacgccaccaccgccaacaccagcgugcugggcuaccacauccccaaggacaccgugguguucgugaaccaguggagcgugaaccacgacccccugaaguggcccaaccccgagaacuucgaccccgccagauuccuggacaaggacggccugaucaacaaggaccugaccagcagagugaugaucuucagcgugggcaagagaagaugcaucggcgaggagcugagcaagaugcagcuguuccuguucaucagcauccuggcccaccagugcgacuucagagccaaccccaacgagcccgccaagaugaacuucagcuacggccugaccaucaagcccaagagcuucaaggugaacgugacccugagagagagcauggagcugcuggacagcgccgugcagaaccugcaggccaaggagaccugccaguga

SEQ ID NO: 2632 - RNA, 333 nt, Artificial Sequence
  NM_001129828 variant
auguggaugggccugauccagcugguggagggcgugaagagaaaggaccagggcuuccuggagaaggaguucuaccacaagaccaacaucaagaugagaugcgaguuccuggccugcuggcccgccuucaccgugcugggcgaggccuggagagaccagguggacuggagcagacugcugagagacgccggccuggugaagaugagcagaaagcccagagccagcagcccccugagcaacaaccacccccccacccccaagagauuccccagacagcccggcagagagaagggccccaucaaggaggugcccggcaccaagggcagccccuga

SEQ ID NO: 2633 - RNA, 384 nt, Artificial Sequence
  NM_001129826 variant
auguggaugggccugauccagcugguggagggcgugaagagaaaggaccagggcuuccuggagaaggaguucuaccacaagaccaacaucaagaugagaugcgaguuccuggccugcuggcccgccuucaccgugcugggcgaggccuggagagaccagguggacuggagcagacugcugagagacgccggccuggugaagaugagcagaaagcccagagccagcagcccccugagcaacaaccacccccccacccccaagagaagaggcagcggcagacacccccugaaccccggccccgaggcccugagcaaguuccccagacagcccggcagagagaagggccccaucaaggaggugcccggcaccaagggcagccccuga

SEQ ID NO: 2634 - RNA, 570 nt, Artificial Sequence
  AAI40914 variant
augaccgacaagaccgagaagguggccguggaccccgagaccguguucaagagacccagagagugcgacagccccagcuaccagaagagacagagaauggcccugcuggccagaaagcagggcgccggcgacagccugaucgccggcagcgccaugagcaaggccaagaagcugaugaccggccacgccaucccccccagccagcuggacagccagaucgacgacuucaccggcuucagcaaggacagaaugaugcagaagcccggcagcaacgcccccgugggcggcaacgugaccagcagcuucagcggcgacgaccuggagugcagagagaccgccagcagccccaagagccagagagagaucaacgccgacaucaagagaaagcuggugaaggagcugagaugcgugggccagaaguacgagaagaucuucgagaugcuggagggcgugcagggccccaccgccgugagaaagagauucuucgagagcaucaucaaggaggccgccagaugcaugagaagagacuucgugaagcaccugaagaagaagcugaagagaaugaucuga

SEQ ID NO: 2635 - RNA, 795 nt, Artificial Sequence
  AAH20662 variant
augcugagacugcugagacuggcccuggccuucuacggcagaaccgccgaccccgccgagagacagggcccccagcagcagggccugccccagggcgacacccagcugaccaccgugcagggcguggugaccagcuucugcggcgacuacggcaugaucgacgagagcaucuacuucagcagcgacguggugaccggcaacgugccccugaaggugggccagaaggugaacguggugguggaggaggacaagccccacuacggccugagagccaucaagguggacguggugcccagacaccuguacggcgccggccccagcgacagcggcaccagagugcugaucggcugcgugaccagcaucaacgaggacaacaucuacaucagcaacagcaucuacuucagcaucgccaucgugagcgaggacuucgugcccuacaagggcgaccugcuggagguggaguacagcaccgagcccggcaucagcaacaucaaggccaccagcgugaagcccaucagaugcauccacaccgaggaggugugcaucaccagcgugcacggcagaaacggcgugaucgacuacaccaucuucuucacccuggacagcgugaagcugcccgacggcuacgugccccagguggacgacaucgugaacguggugaugguggagagcauccaguucugcuucaucuggagagccaucagcaucacccccgugcacaagagcagcagcggcuuccaggacgacggcggccugggcagacccaagagagagagaagaagccagagcaucuga

SEQ ID NO: 2636 - RNA, 2844 nt, Artificial Sequence
  CCDS735.1 variant
augagccugcccagcagacagaccgccaucaucgugaacccccccccccccgaguacaucaacaccaagaagaacggcagacugaccaaccagcugcaguaccugcagaagguggugcugaaggaccuguggaagcacagcuucagcuggcccuuccagagacccguggacgccgugaagcugcagcugcccgacuacuacaccaucaucaagaaccccauggaccugaacaccaucaagaagagacuggagaacaaguacuacgccaaggccagcgagugcaucgaggacuucaacaccauguucagcaacugcuaccuguacaacaagcccggcgacgacaucgugcugauggcccaggcccuggagaagcuguucaugcagaagcugagccagaugccccaggaggagcagguggugggcgugaaggagagaaucaagaagggcacccagcagaacaucgccgugagcagcgccaaggagaagagcagccccagcgccaccgagaagguguucaagcagcaggagauccccagcguguuccccaagaccagcaucagcccccugaacguggugcagggcgccagcgugaacagcagcagccagaccgccgcccaggugaccaagggcgugaagagaaaggccgacaccaccacccccgccaccagcgccgugaaggccagcagcgaguucagccccaccuucaccgagaagagcguggcccugccccccaucaaggagaacaugcccaagaacgugcugcccgacagccagcagcaguacaacguggugaagaccgugaaggugaccgagcagcugagacacugcagcgagauccugaaggagaugcuggccaagaagcacuucagcuacgccuggcccuucuacaaccccguggacgugaacgcccugggccugcacaacuacuacgacguggugaagaaccccauggaccugggcaccaucaaggagaagauggacaaccaggaguacaaggacgccuacaaguucgccgccgacgugagacugauguucaugaacugcuacaaguacaacccccccgaccacgagguggugaccauggccagaaugcugcaggacguguucgagacccacuucagcaagauccccaucgagcccguggagagcaugccccugugcuacaucaagaccgacaucaccgagaccaccggcagagagaacaccaacgaggccagcagcgagggcaacagcagcgacgacagcgaggacgagagagugaagagacuggccaagcugcaggagcagcugaaggccgugcaccagcagcugcaggugcugagccaggugcccuucagaaagcugaacaagaagaaggagaagagcaagaaggagaagaagaaggagaaggugaacaacagcaacgagaaccccagaaagaugugcgagcagaugagacugaaggagaagagcaagagaaaccagcccaagaagagaaagcagcaguucaucggccugaagagcgaggacgaggacaacgccaagcccaugaacuacgacgagaagagacagcugagccugaacaucaacaagcugcccggcgacaagcugggcagaguggugcacaucauccagagcagagagcccagccugagcaacagcaaccccgacgagaucgagaucgacuucgagacccugaaggccagcacccugagagagcuggagaaguacgugagcgccugccugagaaagagaccccugaagccccccgccaagaagaucaugaugagcaaggaggagcugcacagccagaagaagcaggagcuggagaagagacugcuggacgugaacaaccagcugaacagcagaaagagacagaccaagagcgacaagacccagcccagcaaggccguggagaacgugagcagacugagcgagagcagcagcagcagcagcagcagcagcgagagcgagagcagcagcagcgaccugagcagcagcgacagcagcgacagcgagagcgagauguuccccaaguucaccgaggugaagcccaacgacagccccagcaaggagaacgugaagaagaugaagaacgagugcaucccccccgagggcagaaccggcgugacccagaucggcuacugcgugcaggacaccaccagcgccaacaccacccuggugcaccagaccacccccagccacgugaugccccccaaccaccaccagcuggccuucaacuaccaggagcuggagcaccugcagaccgugaagaacaucagcccccugcagauccugccccccagcggcgacagcgagcagcugagcaacggcaucaccgugaugcaccccagcggcgacagcgacaccaccaugcuggagagcgagugccaggcccccgugcagaaggacaucaagaucaagaacgccgacagcuggaagagccugggcaagcccgugaagcccagcggcgugaugaagagcagcgacgagcuguucaaccaguucagaaaggccgccaucgagaaggaggugaaggccagaacccaggagcugaucagaaagcaccuggagcagaacaccaaggagcugaaggccagccaggagaaccagagagaccugggcaacggccugaccguggagagcuucagcaacaagauccagaacaagugcagcggcgaggagcagaaggagcaccagcagagcagcgaggcccaggacaagagcaagcuguggcugcugaaggacagagaccuggccagacagaaggagcaggagagaagaagaagagaggccauggugggcaccaucgacaugacccugcagagcgacaucaugaccauguucgagaacaacuucgacuga

SEQ ID NO: 2637 - RNA, 543 nt, Artificial Sequence
  CCDS35455.1 variant
augcaggccgagggcagaggcaccggcggcagcaccggcgacgccgacggccccggcggccccggcauccccgacggccccggcggcaacgccggcggccccggcgaggccggcgccaccggcggcagaggccccagaggcgccggcgccgccagagccagcggccccagaggcggcgcccccagaggcccccacggcggcgccgccagcgcccaggacggcagaugccccugcggcgccagaagacccgacagcagacugcuggagcugcacaucaccaugcccuucagcagccccauggaggccgagcuggugagaagaauccugagcagagacgccgccccccugcccagacccggcgccgugcugaaggacuucaccgugagcggcaaccugcuguucaucagacugaccgccgccgaccacagacagcugcagcugagcaucagcagcugccugcagcagcugagccugcugauguggaucacccagugcuuccugcccguguuccuggcccaggcccccagcggccagagaagauga

SEQ ID NO: 2638 - RNA, 633 nt, Artificial Sequence
  CAA10196 variant
augcaggccgagggccagggcaccggcggcagcaccggcgacgccgacggccccggcggccccggcauccccgacggccccggcggcaacgccggcggccccggcgaggccggcgccaccggcggcagaggccccagaggcgccggcgccgccagagccagcggccccagaggcggcgcccccagaggcccccacggcggcgccgccagcgcccaggacggcagaugccccugcggcgccagaagacccgacagcagacugcugcagcugcacaucaccaugcccuucagcagccccauggaggccgagcuggugagaagaauccugagcagagacgccgccccccugcccagacccggcgccgugcugaaggacuucaccgugagcggcaaccugcuguucaugagcgugagagaccaggacagagagggcgccggcagaaugagaguggugggcuggggccugggcagcgccagccccgagggccagaaggccagagaccugagaacccccaagcacaaggugagcgagcagagacccggcacccccggcccccccccccccgagggcgcccagggcgacggcugcagaggcguggccuucaacgugauguucagcgccccccacaucuga

SEQ ID NO: 2639 - RNA, 1992 nt, Artificial Sequence
  CCDS13459.1 variant
auggccgccaccgagaucagcgugcugagcgagcaguucaccaagaucaaggagcuggagcugaugcccgagaagggccugaaggaggaggagaaggacggcgugugcagagagaaggaccacagaagccccagcgagcuggaggccgagagaaccagcggcgccuuccaggacagcgugcuggaggaggagguggagcuggugcuggcccccagcgaggagagcgagaaguacauccugacccugcagaccgugcacuucaccagcgaggccguggagcugcaggacaugagccugcugagcauccagcagcaggagggcgugcaggugguggugcagcagcccggccccggccugcuguggcuggaggagggccccagacagagccugcagcagugcguggccaucagcauccagcaggagcuguacagcccccaggagauggaggugcugcaguuccacgcccuggaggagaacgugaugguggccagcgaggacagcaagcuggccgugagccuggccgagaccaccggccugaucaagcuggaggaggagcaggagaagaaccagcugcuggccgagagaaccaaggagcagcuguucuucguggagaccaugagcggcgacgagagaagcgacgagaucgugcugaccgugagcaacagcaacguggaggagcaggaggaccagcccaccgccggccaggccgacgccgagaaggccaagagcaccaagaaccagagaaagaccaagggcgccaagggcaccuuccacugcgacgugugcauguucaccagcagcagaaugagcagcuucaacagacacaugaagacccacaccagcgagaagccccaccugugccaccugugccugaagaccuucagaaccgugacccugcugagaaaccacgugaacacccacaccggcaccagacccuacaagugcaacgacugcaacauggccuucgugaccagcggcgagcuggugagacacagaagauacaagcacacccacgagaagcccuucaagugcagcaugugcaaguacgccagcguggaggccagcaagcugaagagacacgugagaagccacaccggcgagagacccuuccagugcugccagugcagcuacgccagcagagacaccuacaagcugaagagacacaugagaacccacagcggcgagaagcccuacgagugccacaucugccacaccagauucacccagagcggcaccaugaagauccacauccugcagaagcacggcgagaacgugcccaaguaccagugcccccacugcgccaccaucaucgccagaaagagcgaccugagagugcacaugagaaaccugcacgccuacagcgccgccgagcugaagugcagauacugcagcgccguguuccacgagagauacgcccugauccagcaccagaagacccacaagaacgagaagagauucaagugcaagcacugcagcuacgccugcaagcaggagagacacaugaccgcccacaucagaacccacaccggcgagaagcccuucaccugccugagcugcaacaagugcuucagacagaagcagcugcugaacgcccacuucagaaaguaccacgacgccaacuucauccccaccguguacaagugcagcaagugcggcaagggcuucagcagauggaucaaccugcacagacacagcgagaagugcggcagcggcgaggccaagagcgccgccagcggcaagggcagaagaaccagaaagagaaagcagaccauccugaaggaggccaccaagggccagaaggaggccgccaagggcuggaaggaggccgccaacggcgacgaggccgccgccgaggaggccagcaccaccaagggcgagcaguuccccggcgagauguuccccguggccugcagagagaccaccgccagagugaaggaggagguggacgagggcgugaccugcgagaugcugcugaacaccauggacaaguga

SEQ ID NO: 2640 - RNA, 2148 nt, Artificial Sequence
  CCDS11368.1 variant
augagccaggugaugagcagcccccugcuggccggcggccacgccgugagccuggcccccugcgacgagcccagaagaacccugcaccccgcccccagccccagccugcccccccagugcagcuacuacaccaccgagggcuggggcgcccaggcccugauggcccccgugcccugcaugggcccccccggcagacugcagcaggccccccagguggaggccaaggccaccugcuuccugcccagccccggcgagaaggcccugggcacccccgaggaccuggacagcuacaucgacuucagccuggagagccugaaccagaugauccuggagcuggaccccaccuuccagcugcugccccccggcaccggcggcagccaggccgagcuggcccagagcaccaugagcaugagaaagaaggaggagagcgaggcccuggacaucaaguacaucgaggugaccagcgccagaagcagaugccacgacggcccccagcacugcagcagccccagcgugaccccccccuucggcagccugagaagcggcggccugcugcugagcagagacgugcccagagagaccagaagcagcagcgagagccugaucuucagcggcaaccagggcagaggccaccagagaccccugccccccagcgagggccugagccccagaccccccaacagccccagcaucagcauccccugcaugggcagcaaggccagcagcccccacggccugggcagcccccugguggccagccccagacuggagaagagacugggcggccuggccccccagagaggcagcagaaucagcgugcugagcgccagccccgugagcgacgugagcuacauguucggcagcagccagagccugcugcacagcagcaacagcagccaccagagcagcagcagaagccuggagagccccgccaacagcagcagcagccugcacagccugggcagcgugagccugugcaccagacccagcgacuuccaggcccccagaaaccccacccugaccaugggccagcccagaaccccccacagccccccccuggccaaggagcacgccagcagcugcccccccagcaucaccaacagcaugguggacauccccaucgugcugaucaacggcugccccgagcccggcagcagccccccccagagaacccccggccaccagaacagcgugcagcccggcgccgccagccccagcaaccccugccccgccaccagaagcaacagccagacccugagcgacgcccccuucaccaccugccccgagggccccgccagagacaugcagcccaccaugaaguucgugauggacaccagcaaguacugguucaagcccaacaucaccagagagcaggccaucgagcugcugagaaaggaggagcccggcgccuucgugaucagagacagcagcagcuacagaggcagcuucggccuggcccugaaggugcaggaggugcccgccagcgcccagagcagacccggcgaggacagcaacgaccugaucagacacuuccugaucgagagcagcgccaagggcgugcaccugaagggcgccgacgaggagcccuacuucggcagccugagcgccuucgugugccagcacagcaucauggcccuggcccugcccugcaagcugaccaucccccagagagagcugggcggcgccgacggcgccagcgacagcaccgacagccccgccagcugccagaagaagagcgccggcugccacacccuguaccugagcagcgugagcguggagacccugaccggcgcccuggccgugcagaaggccaucagcaccaccuucgagagagacauccugcccacccccaccguggugcacuucaaggugaccgagcagggcaucacccugaccgacgugcagagaaagguguucuucagaagacacuacccccugaccacccugagauucugcggcauggaccccgagcagagaaaguggcagaaguacugcaagcccagcuggaucuucggcuucguggccaagagccagaccgagccccaggagaacgugugccaccuguucgccgaguacgacauggugcagcccgccagccaggugaucggccuggugaccgcccugcugcaggacgccgagagaauguga

SEQ ID NO: 2641 - RNA, 1302 nt, Artificial Sequence
  AAH06510 variant
auggcccugagagugaccagaaacagcaagaucaacgccgagaacaaggccaagaucaacauggccggcgccaagagagugcccaccgcccccgccgccaccagcaagcccggccugagacccagaaccgcccugggcgacaucggcaacaaggugagcgagcagcugcaggccaagaugcccaugaagaaggaggccaagcccagcgccaccggcaaggugaucgacaagaagcugcccaagccccuggagaaggugcccaugcuggugcccgugcccgugagcgagcccgugcccgagcccgagcccgagcccgagcccgagcccgugaaggaggagaagcugagccccgagcccauccugguggacaccgccagccccagccccauggagaccagcggcugcgcccccgccgaggaggaccugugccaggccuucagcgacgugauccuggccgugaacgacguggacgccgaggacggcgccgaccccaaccugugcagcgaguacgugaaggacaucuacgccuaccugagacagcuggaggaggagcaggccgugagacccaaguaccugcugggcagagaggugaccggcaacaugagagccauccugaucgacuggcuggugcaggugcagaugaaguucagacugcugcaggagaccauguacaugaccgugagcaucaucgacagauucaugcagaacaacugcgugcccaagaagaugcugcagcuggugggcgugaccgccauguucaucgccagcaaguacgaggagauguacccccccgagaucggcgacuucgccuucgugaccgacaacaccuacaccaagcaccagaucagacagauggagaugaagauccugagagcccugaacuucggccugggcagaccccugccccugcacuuccugagaagagccagcaagaucggcgagguggacguggagcagcacacccuggccaaguaccugauggagcugaccaugcuggacuacgacauggugcacuucccccccagccagaucgccgccggcgccuucugccuggcccugaagauccuggacaacggcgaguggacccccacccugcagcacuaccugagcuacaccgaggagagccugcugcccgugaugcagcaccuggccaagaacguggugauggugaaccagggccugaccaagcacaugaccgugaagaacaaguacgccaccagcaagcacgccaagaucagcacccugccccagcugaacagcgcccuggugcaggaccuggccaaggccguggccaagguguga

SEQ ID NO: 2642 - RNA, 888 nt, Artificial Sequence
  AAA58392 variant
auggagcaccagcugcugugcugcgagguggagaccaucagaagagccuaccccgacgccaaccugcugaacgacagagugcugagagccaugcugaaggccgaggagaccugcgcccccagcgugagcuacuucaagugcgugcagaaggaggugcugcccagcaugagaaagaucguggccaccuggaugcuggaggugugcgaggagcagaagugcgaggaggagguguucccccuggccaugaacuaccuggacagauuccugagccuggagcccgugaagaagagcagacugcagcugcugggcgccaccugcauguucguggccagcaagaugaaggagaccaucccccugaccgccgagaagcugugcaucuacaccgacaacagcaucagacccgaggagcugcugcagauggagcugcugcuggugaacaagcugaaguggaaccuggccgccaugaccccccacgacuucaucgagcacuuccugagcaagaugcccgaggccgaggagaacaagcagaucaucagaaagcacgcccagaccuucguggcccugugcgccaccgacgugaaguucaucagcaacccccccagcaugguggccgccggcagcgugguggccgccgugcagggccugaaccugagaagccccaacaacuuccugagcuacuacagacugaccagauuccugagcagagugaucaagugcgaccccgacugccugagagccugccaggagcagaucgaggcccugcuggagagcagccugagacaggcccagcagaacauggaccccaaggccgccgaggaggaggaggaggaggaggaggagguggaccuggccugcacccccaccgacgugagagacguggacaucuga

SEQ ID NO: 2643 - RNA, 651 nt, Artificial Sequence
  AAA36601 variant
augcugagacugagcgagagaaacaugaaggugcugcuggccgccgcccugaucgccggcagcguguucuuccugcugcugcccggccccagcgccgccgacgagaagaagaagggccccaaggugaccgugaagguguacuucgaccugagaaucggcgacgaggacgugggcagagugaucuucggccuguucggcaagaccgugcccaagaccguggacaacuucguggcccuggccaccggcgagaagggcuucggcuacaagaacagcaaguuccacagagugaucaaggacuucaugauccagggcggcgacuucaccagaggcgacggcaccggcggcaagagcaucuacggcgagagauuccccgacgagaacuucaagcugaagcacuacggccccggcugggugagcauggccaacgccggcaaggacaccaacggcagccaguucuucaucaccaccgugaagaccgccuggcuggacggcaagcacgugguguucggcaaggugcuggagggcauggagguggugagaaagguggagagcaccaagaccgacagcagagacaagccccugaaggacgugaucaucgccgacugcggcaagaucgagguggagaagcccuucgccaucgccaaggaguga

SEQ ID NO: 2644 - RNA, 1044 nt, Artificial Sequence
  AAD10634 variant
augcccagaggccagaagagcaagcugagagccagagagaagagaagaaaggccagagaggagacccagggccugaagguggcccacgccaccgccgccgagaaggaggagugccccagcagcagccccgugcugggcgacacccccaccagcagccccgccgccggcaucccccagaagccccagggcgccccccccaccaccaccgccgccgccgccgugagcugcaccgagagcgacgagggcgccaagugccagggcgaggagaacgccagcuucagccaggccaccaccagcaccgagagcagcgugaaggaccccguggccugggaggccggcaugcugaugcacuucauccugagaaaguacaagaugagagagcccaucaugaaggccgacaugcugaaggugguggacgagaaguacaaggaccacuucaccgagauccugaacggcgccagcagaagacuggagcugguguucggccuggaccugaaggaggacaaccccagcggccacaccuacacccuggugagcaagcugaaccugaccaacgacggcaaccugagcaacgacugggacuuccccagaaacggccugcugaugccccugcugggcgugaucuuccugaagggcaacagcgccaccgaggaggagaucuggaaguucaugaacgugcugggcgccuacgacggcgaggagcaccugaucuacggcgagcccagaaaguucaucacccaggaccuggugcaggagaaguaccugaaguacgagcaggugcccaacagcgacccccccagauaccaguuccuguggggccccagagccuacgccgagaccaccaagaugaaggugcuggaguuccuggccaagaugaacggcgccacccccagagacuuccccagccacuacgaggaggcccugagagacgaggaggagagagcccaggugagaagcagcgugagagccagaagaagaaccaccgccaccaccuucagagccagaagcagagcccccuucagcagaagcagccaccccauguga

SEQ ID NO: 2645 - RNA, 2436 nt, Artificial Sequence
  BAF91373 variant
auggagagccagggcgugccccccggccccuacagagccaccaagcuguggaacgaggugaccaccagcuucagagccggcaugccccugagaaagcacagacagcacuucaagaaguacggcaacugcuucaccgccggcgaggccguggacuggcuguacgaccugcugagaaacaacagcaacuucggccccgaggugaccagacagcagaccauccagcugcugagaaaguuccugaagaaccacgugaucgaggacaucaagggcagauggggcagcgagaacguggacgacaacaaccagcuguucagauuccccgccaccagcccccugaagacccugcccagaagauaccccgagcugagaaagaacaacaucgagaacuucagcaaggacaaggacagcaucuucaagcugagaaaccugagcagaagaacccccaagagacacggccugcaccugagccaggagaacggcgagaagaucaagcacgagaucaucaacgaggaccaggagaacgccaucgacaacagagagcugagccaggaggacguggaggagguguggagauacgugauccugaucuaccugcagaccauccugggcgugcccagccuggaggaggugaucaaccccaagcaggugaucccccaguacaucauguacaacauggccaacaccagcaagagaggcguggugauccugcagaacaagagcgacgaccugccccacugggugcugagcgccaugaagugccuggccaacuggcccagaagcaacgacaugaacaaccccaccuacgugggcuucgagagagacguguucagaaccaucgccgacuacuuccuggaccugcccgagccccugcugaccuucgaguacuacgagcuguucgugaacauccugguggugugcggcuacaucaccgugagcgacagaagcagcggcauccacaagauccaggacgacccccagagcagcaaguuccugcaccugaacaaccugaacagcuucaagagcaccgagugccugcugcugagccugcugcacagagagaagaacaaggaggagagcgacagcaccgagagacugcagaucagcaaccccggcuuccaggagagaugcgccaagaagaugcagcuggugaaccugagaaacagaagagugagcgccaacgacaucaugggcggcagcugccacaaccugaucggccugagcaacaugcacgaccugagcagcaacagcaagcccagaugcugcagccuggagggcaucguggacgugcccggcaacagcagcaaggaggccagcagcguguuccaccagagcuuccccaacaucgagggccagaacaacaagcuguuccuggagagcaagcccaagcaggaguuccugcugaaccugcacagcgaggagaacauccagaagcccuucagcgccggcuucaagagaaccagcacccugaccgugcaggaccaggaggagcugugcaacggcaagugcaagagcaagcagcugugcagaagccagagccugcugcugagaagcagcaccagaagaaacagcuacaucaacacccccguggccgagaucaucaugaagcccaacgugggccagggcagcaccagcgugcagaccgccauggagagcgagcugggcgagagcagcgccaccaucaacaagagacugugcaagagcaccaucgagcugagcgagaacagccugcugcccgccagcagcaugcugaccggcacccagagccugcugcagccccaccuggagagaguggccaucgacgcccugcagcugugcugccugcugcugcccccccccaacagaagaaagcugcagcugcugaugagaaugaucagcagaaugagccagaacguggacaugcccaagcugcacgacgccaugggcaccagaagccugaugauccacaccuucagcagaugcgugcugugcugcgccgaggagguggaccuggacgagcugcuggccggcagacuggugagcuuccugauggaccaccaccaggagauccugcaggugcccagcuaccugcagaccgccguggagaagcaccuggacuaccugaagaagggccacaucgagaaccccggcgacggccuguucgccccccugcccaccuacagcuacugcaagcagaucagcgcccaggaguucgacgagcagaaggugagcaccagccaggccgccaucgccgagcugcuggagaacaucaucaagaacagaagccugccccugaaggagaagagaaagaagcugaagcaguuccagaaggaguacccccugaucuaccagaagagauuccccaccaccgagagcgaggccgcccuguucggcgacaagcccaccaucaagcagcccaugcugauccugagaaagcccaaguucagaagccugagauga

SEQ ID NO: 2646 - RNA, 297 nt, Artificial Sequence
  AAA46940 variant
augcacggcgacacccccacccugcacgaguacaugcuggaccugcagcccgagaccaccgaccuguacugcuacgagcagcugaacgacagcagcgaggaggaggacgagaucgacggccccgccggccaggccgagcccgacagagcccacuacaacaucgugaccuucugcugcaagugcgacagcacccugagacugugcgugcagagcacccacguggacaucagaacccuggaggaccugcugaugggcacccugggcaucgugugccccaucugcagccagaagcccuga

SEQ ID NO: 2647 - RNA, 318 nt, Artificial Sequence
  AAA46947 variant
augcacggccccaaggccacccugcaggacaucgugcugcaccuggagccccagaacgagauccccguggaccugcugugccacgagcagcugagcgacagcgaggaggagaacgacgagaucgacggcgugaaccaccagcaccugcccgccagaagagccgagccccagagacacaccaugcugugcaugugcugcaagugcgaggccagaaucaagcuggugguggagagcagcgccgacgaccugagagccuuccagcagcuguuccugaacacccugagcuucgugugccccuggugcgccagccagcaguga

SEQ ID NO: 2648 - RNA, 297 nt, Artificial Sequence
  AAA46951 variant
augagaggcgagacccccacccugcaggacuacgugcuggaccugcagcccgaggccaccgaccugcacugcuacgagcagcugcccgacagcagcgacgaggaggacgugaucgacagccccgccggccaggccgagcccgacaccagcaacuacaacaucgugaccuucugcugccagugcaagagcacccugagacugugcgugcagagcacccagguggacaucagaauccugcaggagcugcugaugggcagcuucggcaucgugugccccaacugcagcaccagacuguga

SEQ ID NO: 2649 - RNA, 294 nt, Artificial Sequence
  AAA46959 variant
augagaggccacaagcccacccugaaggaguacgugcuggaccuguaccccgagcccaccgaccuguacugcuacgagcagcugagcgacagcagcgacgaggacgagggccuggacagacccgacggccaggcccagcccgccaccgccgacuacuacaucgugaccugcugccacaccugcaacaccaccgugagacugugcgugaacagcaccgccagcgaccugagaaccauccagcagcugcugaugggcaccgugaacaucgugugccccaccugcgcccagcaguga

SEQ ID NO: 2650 - RNA, 300 nt, Artificial Sequence
  AAA46967 variant
augcacggcgagaucaccacccugcaggacuacgugcuggaccuggagcccgaggccaccgaccuguacugcuacgagcagcugugcgacagcagcgaggaggaggaggacaccaucgacggccccgccggccaggccaagcccgacaccagcaacuacaacaucgugaccagcugcugcaagugcgaggccacccugagacugugcgugcagagcacccacaucgacaucagaaagcuggaggaccugcugaugggcaccuucggcaucgugugccccggcugcagccagagagccuga

SEQ ID NO: 2651 - RNA, 330 nt, Artificial Sequence
  AAA47051 variant
augagaggccccaagcccacccugcaggagaucgugcuggaccugugccccuacaacgagauccagcccguggaccuggugugccacgagcagcugggcgagagcgaggacgagaucgacgagcccgaccacgccgugaaccaccagcaccagcugcuggccagaagagacgagccccagagacacaccauccagugcagcugcugcaagugcaacaacacccugcagcuggugguggaggccagcagagacacccugagacagcugcagcagcuguucauggacagccugggcuucgugugccccuggugcgccaccgccaaccaguga

SEQ ID NO: 2652 - RNA, 321 nt, Artificial Sequence
  CAA52574 variant
augcacggccccagagagacccugcaggagaucgugcugcaccuggagccccagaacgagcuggaccccguggaccugcugugcuacgagcagcugagcgagagcgaggaggagaacgacgaggccgacggcgugagccacgcccagcugcccgccagaagagccgagccccagagacacaagauccugugcgugugcugcaagugcgacggcagaaucgagcugaccguggagagcagcgccgaggaccugagaacccugcagcagcuguuccugagcacccugagcuucgugugccccuggugcgccaccaaccaguga

SEQ ID NO: 2653 - RNA, 306 nt, Artificial Sequence
  M62877.1 variant
augagaggcaacgugccccagcugaaggacguggugcugcaccugaccccccagaccgagaucgaccugcagugcuacgagcaguucgacagcagcgaggaggaggacgagguggacaacaugagagaccagcugcccgagagaagagccggccaggccaccugcuacagaaucgaggcccccugcugcagaugcagcagcguggugcagcuggccguggagagcagcggcgacacccugagaguggugcagcagaugcugaugggcgagcugagccuggugugccccugcugcgccaacaacuga

SEQ ID NO: 2654 - RNA, 300 nt, Artificial Sequence
  CAA52586 variant
augagaggcgacaaggccaccaucaaggacuacauccuggaccugcagcccgagaccaccgaccugcacugcuacgagcagcugggcgacagcagcgacgaggaggacaccgacggcguggacagacccgacggccaggccgagcaggccaccagcaacuacuacaucgugaccuacugccacagcugcgacagcacccugagacugugcauccacagcaccgccaccgaccugagaacccugcagcagaugcugcugggcacccugcagguggugugccccggcugcgccagacuguga

SEQ ID NO: 2655 - RNA, 318 nt, Artificial Sequence
  CAA52597 variant
augcacggcaaggugcccacccugcaggacguggugcuggagcugaccccccagaccgagaucgaccugcagugcaacgagcagcuggacagcagcgaggacgaggacgaggacgagguggaccaccugcaggagagaccccagcaggccagacaggccaagcagcacaccugcuaccugauccacgugcccugcugcgagugcaaguucguggugcagcuggacauccagagcaccaaggaggaccugagaguggugcagcagcugcugaugggcgcccugaccgugaccugcccccugugcgccagcagcaacuga

SEQ ID NO: 2656 - RNA, 297 nt, Artificial Sequence
  AAF13691 variant
augagaggcaacaaccccacccugagagaguacauccuggaccugcaccccgagcccaccgaccuguucugcuacgagcagcugugcgacagcagcgacgaggacgagaucggccuggacagacccgacggccaggcccagcccgccaccgccaacuacuacaucgugaccugcugcuacaccugcgacaccaccgugagacugugcaucaacagcaccaccaccgacgugagaacccugcagcagcugcugaugggcaccugcaccaucgugugccccagcugcgcccagcaguga

SEQ ID NO: 2657 - RNA, 324 nt, Artificial Sequence
  ACL12335 variant
augcacggccccaaggccacccugugcgacaucgugcuggaccuggagccccagaacuacgaggagguggaccuggugugcuacgagcagcugcccgacagcgacagcgagaacgagaaggacgagcccgacggcgugaaccacccccugcugcuggccagaagagccgagccccagagacacaacaucgugugcgugugcugcaagugcaacaaccagcugcagcuggugguggagaccagccaggacggccugagagcccugcagcagcuguucauggacacccugagcuucgugugcccccugugcgccgccaaccaguga

SEQ ID NO: 2658 - RNA, 318 nt, Artificial Sequence
  AAA79500 variant
augcacggcaaggugcccacccugcaggaggugauccuggagcuggccccccagaccgagaucgaccugcagugcaacgagcagcuggacagcagcgaggacgaggacgaggacgagaucgaccaccugcuggagagaccccagcaggccagacaggccgagcagcacaagugcuaccugauccacgugcccugcugcaagugcgagcugguggugcagcuggacauccagagcaccaaggaggagcugagaguggugcagcagcugcugaugggcgcccugaccgugaccugcccccugugcgccagcagcaaguga

SEQ ID NO: 2659 - RNA, 1392 nt, Artificial Sequence
  AAF80488 variant
augggcaaggagaagacccacaucaacaucguggugaucggccacguggacagcggcaagagcaccaccaccggccaccugaucuacaagugcggcggcaucgacaagagaaccaucgagaaguucgagaaggaggccgccgagaugggcaagggcagcuucaaguacgccugggugcuggacaagcugaaggccgagagagagagaggcaucaccaucgacaucagccuguggaaguucgagaccaccaaguacuacaucaccaucaucgacgcccccggccacagagacuucaucaagaacaugaucaccggcaccagccaggccgacugcgccgugcugaucguggccgccggcgugggcgaguucgaggccggcaucagcaagaacggccagaccagagagcacgcccugcuggccuacacccugggcgugaagcagcugaucgugggcgugaacaagauggacagcaccgagcccgccuacagcgagaagagauacgacgagaucgugaaggaggugagcgccuacaucaagaagaucggcuacaaccccgccaccgugcccuucgugcccaucagcggcuggcacggcgacaacaugcuggagcccagccccaacaugcccugguucaagggcuggaagguggagagaaaggagggcaacgccagcggcgugagccugcuggaggcccuggacaccauccugccccccaccagacccaccgacaagccccugagacugccccugcaggacguguacaagaucggcggcaucggcaccgugcccgugggcagaguggagaccggcauccugagacccggcaugguggugaccuucgcccccgugaacaucaccaccgaggugaagagcguggagaugcaccacgaggcccugagcgaggcccugcccggcgacaacgugggcuucaacgugaagaacgugagcgugaaggacaucagaagaggcaacgugugcggcgacagcaagagcgaccccccccaggaggccgcccaguucaccagccaggugaucauccugaaccaccccggccagaucagcgccggcuacagccccgugaucgacugccacaccgcccacaucgccugcaaguucgccgagcugaaggagaagaucgacagaagaagcggcaagaagcuggaggacaaccccaagagccugaagagcggcgacgccgccaucguggagauggugcccggcaagcccaugugcguggagagcuucagccaguaccccccccugggcagauucgccgugagagacaugagacagaccguggccgugggcgugaucaagaacguggagaagaagagcggcggcgccggcaaggugaccaagagcgcccagaaggcccagaaggccggcaaguga

SEQ ID NO: 2660 - RNA, 2919 nt, Artificial Sequence
  EAW51573 variant
auggacaccgaccuguacgacgaguucggcaacuacaucggccccgagcuggacagcgacgaggacgacgacgagcugggcagagagaccaaggaccuggacgagauggacgacgacgacgacgacgacgacgugggcgaccacgacgacgaccaccccggcauggagguggugcugcacgaggacaagaaguacuaccccaccgccgaggagguguacggccccgagguggagaccaucgugcaggaggaggacacccagccccugaccgagcccaucaucaagcccgugaagaccaagaaguucacccugauggagcagacccugcccgugaccguguacgagauggacuuccuggccgaccugauggacaacagcgagcugaucagaaacgugacccugugcggccaccugcaccacggcaagaccugcuucguggacugccugaucgagcagacccaccccgagaucagaaagagauacgaccaggaccugugcuacaccgacauccuguucaccgagcaggagagaggcgugggcaucaagagcacccccgugaccguggugcugcccgacaccaagggcaagagcuaccuguucaacaucauggacacccccggccacgugaacuucagcgacgaggugaccgccggccugagaaucagcgacggcguggugcuguucaucgacgccgccgagggcgugaugcugaacaccgagagacugaucaagcacgccgugcaggagagacuggccgugaccgugugcaucaacaagaucgacagacugauccuggagcugaagcugccccccaccgacgccuacuacaagcugagacacaucguggacgaggugaacggccugaucagcauguacagcaccgacgagaaccugauccugagcccccugcugggcaacgugugcuucagcagcagccaguacagcaucugcuucacccugggcagcuucgccaagaucuacgccgacaccuucggcgacaucaacuaccaggaguucgccaagagacuguggggcgacaucuacuucaaccccaagaccagaaaguucaccaagaaggcccccaccagcagcagccagagaagcuucguggaguucauccuggagccccuguacaagauccuggcccagguggugggcgacguggacaccagccugcccagaacccuggacgagcugggcauccaccugaccaaggaggagcugaagcugaacaucagaccccugcugagacuggugugcaagaaguucuucggcgaguucaccggcuucguggacaugugcgugcagcacauccccagccccaaggugggcgccaagcccaagaucgagcacaccuacaccggcggcguggacagcgaccugggcgaggccaugagcgacugcgaccccgacggcccccugaugugccacaccaccaagauguacagcaccgacgacggcgugcaguuccacgccuucggcagagugcugagcggcaccauccacgccggccagcccgugaaggugcugggcgagaacuacacccuggaggacgaggaggacagccagaucugcaccgugggcagacuguggaucagcguggccagauaccacaucgaggugaacagagugcccgccggcaacugggugcugaucgagggcguggaccagcccaucgugaagaccgccaccaucaccgagcccagaggcaacgaggaggcccagaucuucagaccccugaaguucaacaccaccagcgugaucaagaucgccguggagcccgugaaccccagcgagcugcccaagaugcuggacggccugagaaaggugaacaagagcuaccccagccugaccaccaagguggaggagagcggcgagcacgugauccugggcaccggcgagcuguaccuggacugcgugaugcacgaccugagaaagauguacagcgagaucgacaucaagguggccgaccccguggugaccuucugcgagaccgugguggagaccagcagccugaagugcuucgccgagacccccaacaagaagaacaagaucaccaugaucgccgagccccuggagaagggccuggccgaggacaucgagaacgagguggugcagaucaccuggaacagaaagaagcugggcgaguucuuccagaccaaguacgacugggaccugcuggccgccagaagcaucugggccuucggccccgacgccaccggccccaacauccugguggacgacacccugcccagcgagguggacaaggcccugcugggcagcgugaaggacagcaucgugcagggcuuccaguggggcaccagagagggcccccugugcgacgagcugaucagaaacgugaaguucaagauccuggacgccgugguggcccaggagccccugcacagaggcggcggccagaucauccccaccgccagaagagugguguacagcgccuuccugauggccacccccagacugauggagcccuacuacuucguggaggugcaggcccccgccgacugcgugagcgccguguacaccgugcuggccagaagaagaggccacgugacccaggacgcccccauccccggcagcccccuguacaccaucaaggccuucauccccgccaucgacagcuucggcuucgagaccgaccugagaacccacacccagggccaggccuucagccugagcguguuccaccacuggcagaucgugcccggcgacccccuggacaagagcaucgugaucagaccccuggagccccagcccgccccccaccuggccagagaguucaugaucaagaccagaagaagaaagggccugagcgaggacgugagcaucagcaaguucuucgacgaccccaugcugcuggagcuggccaagcaggacguggugcugaacuaccccauguga

SEQ ID NO: 2661 - RNA, 1971 nt, Artificial Sequence
  EAW50963 variant
augagacccagcggcaccgccggcgccgcccugcuggcccugcuggccgcccugugccccgccagcagagcccuggaggagaagaaggugugccagggcaccagcaacaagcugacccagcugggcaccuucgaggaccacuuccugagccugcagagaauguucaacaacugcgagguggugcugggcaaccuggagaucaccuacgugcagagaaacuacgaccugagcuuccugaagaccauccaggagguggccggcuacgugcugaucgcccugaacaccguggagagaaucccccuggagaaccugcagaucaucagaggcaacauguacuacgagaacagcuacgcccuggccgugcugagcaacuacgacgccaacaagaccggccugaaggagcugcccaugagaaaccugcaggagauccugcacggcgccgugagauucagcaacaaccccgcccugugcaacguggagagcauccaguggagagacaucgugagcagcgacuuccugagcaacaugagcauggacuuccagaaccaccugggcagcugccagaagugcgaccccagcugccccaacggcagcugcuggggcgccggcgaggagaacugccagaagcugaccaagaucaucugcgcccagcagugcagcggcagaugcagaggcaagagccccagcgacugcugccacaaccagugcgccgccggcugcaccggccccagagagagcgacugccuggugugcagaaaguucagagacgaggccaccugcaaggacaccugccccccccugaugcuguacaaccccaccaccuaccagauggacgugaaccccgagggcaaguacagcuucggcgccaccugcgugaagaagugccccagaaacuacguggugaccgaccacggcagcugcgugagagccugcggcgccgacagcuacgagauggaggaggacggcgugagaaagugcaagaagugcgagggccccugcagaaaggugugcaacggcaucggcaucggcgaguucaaggacagccugagcaucaacgccaccaacaucaagcacuucaagaacugcaccagcaucagcggcgaccugcacauccugcccguggccuucagaggcgacagcuucacccacacccccccccuggacccccaggagcuggacauccugaagaccgugaaggagaucaccggcuuccugcugauccaggccuggcccgagaacagaaccgaccugcacgccuucgagaaccuggagaucaucagaggcagaaccaagcagcacggccaguucagccuggccguggugagccugaacaucaccagccugggccugagaagccugaaggagaucagcgacggcgacgugaucaucagcggcaacaagaaccugugcuacgccaacaccaucaacuggaagaagcuguucggcaccagcggccagaagaccaagaucaucagcaacagaggcgagaacagcugcaaggccaccggccaggugugccacgcccugugcagccccgagggcugcuggggccccgagcccagagacugcgugagcugcagaaacgugagcagaggcagagagugcguggacaagugcaaccugcuggagggcgagcccagagaguucguggagaacagcgagugcauccagugccaccccgagugccugccccaggccaugaacaucaccugcaccggcagaggccccgacaacugcauccagugcgcccacuacaucgacggcccccacugcgugaagaccugccccgccggcgugaugggcgagaacaacacccugguguggaaguacgccgacgccggccacgugugccaccugugccaccccaacugcaccuacggcugcaccggccccggccuggagggcugccccaccaacggcagcuacaucgugagccacuuccccagaagcuucuacaagaugagcgugcac

SEQ ID NO: 2662 - RNA, 3411 nt, Artificial Sequence
  ADL28125 variant
augagacccagcggcaccgccggcgccgcccugcuggcccugcuggccgcccugugccccgccagcagagcccuggaggagaagaaggugugccagggcaccagcaacaagcugacccagcugggcaccuucgaggaccacuuccugagccugcagagaauguucaacaacugcgagguggugcugggcaaccuggagaucaccuacgugcagagaaacuacgaccugagcuuccugaagaccauccaggagguggccggcuacgugcugaucgcccugaacaccguggagagaaucccccuggagaaccugcagaucaucagaggcaacauguacuacgagaacagcuacgcccuggccgugcugagcaacuacgacgccaacaagaccggccugaaggagcugcccaugagaaaccugcaggagauccugcacggcgccgugagauucagcaacaaccccgcccugugcaacguggagagcauccaguggagagacaucgugagcagcgacuuccugagcaacaugagcauggacuuccagaaccaccugggcagcugccagaagugcgaccccagcugccccaacggcagcugcuggggcgccggcgaggagaacugccagaagcugaccaagaucaucugcgcccagcagugcagcggcagaugcagaggcaagagccccagcgacugcugccacaaccagugcgccgccggcugcaccggccccagagagagcgacugccuggugugcagaaaguucagagacgaggccaccugcaaggacaccugccccccccugaugcuguacaaccccaccaccuaccagauggacgugaaccccgagggcaaguacagcuucggcgccaccugcgugaagaagugccccagaaacuacguggugaccgaccacggcagcugcgugagagccugcggcgccgacagcuacgagauggaggaggacggcgugagaaagugcaagaagugcgagggccccugcagaaaggugugcaacggcaucggcaucggcgaguucaaggacagccugagcaucaacgccaccaacaucaagcacuucaagaacugcaccagcaucagcggcgaccugcacauccugcccguggccuucagaggcgacagcuucacccacacccccccccuggacccccaggagcuggacauccugaagaccgugaaggagaucaccggcuuccugcugauccaggccuggcccgagaacagaaccgaccugcacgccuucgagaaccuggagaucaucagaggcagaaccaagcagcacggccaguucagccuggccguggugagccugaacaucaccagccugggccugagaagccugaaggagaucagcgacggcgacgugaucaucagcggcaacaagaaccugugcuacgccaacaccaucaacuggaagaagcuguucggcaccagcggccagaagaccaagaucaucagcaacagaggcgagaacagcugcaaggccaccggccaggugugccacgcccugugcagccccgagggcugcuggggccccgagcccagagacugcgugagcugcagaaacgugagcagaggcagagagugcguggacaagugcaaccugcuggagggcgagcccagagaguucguggagaacagcgagugcauccagugccaccccgagugccugccccaggccaugaacaucaccugcaccggcagaggccccgacaacugcauccagugcgcccacuacaucgacggcccccacugcgugaagaccugccccgccggcgugaugggcgagaacaacacccugguguggaaguacgccgacgccggccacgugugccaccugugccaccccaacugcaccuacggcugcaccggccccggccuggagggcugccccaccaacggccccaagauccccagcaucgccaccggcauggugggcgcccugcugcugcugcuggugguggcccugggcaucggccuguucaugagaagaagacacaucgugagaaagagaacccugagaagacugcugcaggagagagagcugguggagccccugacccccagcggcgaggcccccaaccaggcccugcugagaauccugaaggagaccgaguucaagaagaucaaggugcugggcagcggcgccuucggcaccguguacaagggccuguggauccccgagggcgagaaggugaagauccccguggccaucaaggagcugagagaggccaccagccccaaggccaacaaggagauccuggacgaggccuacgugauggccagcguggacaacccccacgugugcagacugcugggcaucugccugaccagcaccgugcagcugaucacccagcugaugcccuucggcugccugcuggacuacgugagagagcacaaggacaacaucggcagccaguaccugcugaacuggugcgugcagaucgccaagggcaugaacuaccuggaggacagaagacuggugcacagagaccuggccgccagaaacgugcuggugaagaccccccagcacgugaagaucaccgacuucggccuggccaagcugcugggcgccgaggagaaggaguaccacgccgagggcggcaaggugcccaucaaguggauggcccuggagagcauccugcacagaaucuacacccaccagagcgacguguggagcuacggcgugaccgugugggagcugaugaccuucggcagcaagcccuacgacggcauccccgccagcgagaucagcagcauccuggagaagggcgagagacugccccagccccccaucugcaccaucgacguguacaugaucauggugaagugcuggaugaucgacgccgacagcagacccaaguucagagagcugaucaucgaguucagcaagauggccagagacccccagagauaccuggugauccagggcgacgagagaaugcaccugcccagccccaccgacagcaacuucuacagagcccugauggacgaggaggacauggacgacgugguggacgccgacgaguaccugaucccccagcagggcuucuucagcagccccagcaccagcagaaccccccugcugagcagccugagcgccaccagcaacaacagcaccguggccugcaucgacagaaacggccugcagagcugccccaucaaggaggacagcuuccugcagagauacagcagcgaccccaccggcgcccugaccgaggacagcaucgacgacaccuuccugcccgugcccggcgaguggcugguguggaagcagagcugcagcagcaccagcagcacccacagcgccgccgccagccugcagugccccagccaggugcugccccccgccagccccgagggcgagaccguggccgaccugcagacccaguga

SEQ ID NO: 2663 - RNA, 150 nt, Artificial Sequence
  CCO13722 variant
augugcgccaccugcgccauccagaccgcccccaccggccccaacaagagcagccugagcgacuucagccugccccugaagcugcacuuccugagcaccaucagcaucagccccuucgccagcaacaaggugcugacccuguucaucuga

SEQ ID NO: 2664 - RNA, 1218 nt, Artificial Sequence
  CCDS47587.1 variant
augagacccagcggcaccgccggcgccgcccugcuggcccugcuggccgcccugugccccgccagcagagcccuggaggagaagaaggugugccagggcaccagcaacaagcugacccagcugggcaccuucgaggaccacuuccugagccugcagagaauguucaacaacugcgagguggugcugggcaaccuggagaucaccuacgugcagagaaacuacgaccugagcuuccugaagaccauccaggagguggccggcuacgugcugaucgcccugaacaccguggagagaaucccccuggagaaccugcagaucaucagaggcaacauguacuacgagaacagcuacgcccuggccgugcugagcaacuacgacgccaacaagaccggccugaaggagcugcccaugagaaaccugcaggagauccugcacggcgccgugagauucagcaacaaccccgcccugugcaacguggagagcauccaguggagagacaucgugagcagcgacuuccugagcaacaugagcauggacuuccagaaccaccugggcagcugccagaagugcgaccccagcugccccaacggcagcugcuggggcgccggcgaggagaacugccagaagcugaccaagaucaucugcgcccagcagugcagcggcagaugcagaggcaagagccccagcgacugcugccacaaccagugcgccgccggcugcaccggccccagagagagcgacugccuggugugcagaaaguucagagacgaggccaccugcaaggacaccugccccccccugaugcuguacaaccccaccaccuaccagauggacgugaaccccgagggcaaguacagcuucggcgccaccugcgugaagaagugccccagaaacuacguggugaccgaccacggcagcugcgugagagccugcggcgccgacagcuacgagauggaggaggacggcgugagaaagugcaagaagugcgagggccccugcagaaaggugugcaacggcaucggcaucggcgaguucaaggacagccugagcaucaacgccaccaacaucaagcacuucaagaacugcaccagcaucagcggcgaccugcacauccugcccguggccuucagaggcgacagcuucacccacacccccccccuggacccccaggagcuggacauccugaagaccgugaaggagaucaccggccugagcuga

SEQ ID NO: 2665 - RNA, 3633 nt, Artificial Sequence
  AAG35789 variant
augagacccagcggcaccgccggcgccgcccugcuggcccugcuggccgcccugugccccgccagcagagcccuggaggagaagaaggugugccagggcaccagcaacaagcugacccagcugggcaccuucgaggaccacuuccugagccugcagagaauguucaacaacugcgagguggugcugggcaaccuggagaucaccuacgugcagagaaacuacgaccugagcuuccugaagaccauccaggagguggccggcuacgugcugaucgcccugaacaccguggagagaaucccccuggagaaccugcagaucaucagaggcaacauguacuacgagaacagcuacgcccuggccgugcugagcaacuacgacgccaacaagaccggccugaaggagcugcccaugagaaaccugcaggagauccugcacggcgccgugagauucagcaacaaccccgcccugugcaacguggagagcauccaguggagagacaucgugagcagcgacuuccugagcaacaugagcauggacuuccagaaccaccugggcagcugccagaagugcgaccccagcugccccaacggcagcugcuggggcgccggcgaggagaacugccagaagcugaccaagaucaucugcgcccagcagugcagcggcagaugcagaggcaagagccccagcgacugcugccacaaccagugcgccgccggcugcaccggccccagagagagcgacugccuggugugcagaaaguucagagacgaggccaccugcaaggacaccugccccccccugaugcuguacaaccccaccaccuaccagauggacgugaaccccgagggcaaguacagcuucggcgccaccugcgugaagaagugccccagaaacuacguggugaccgaccacggcagcugcgugagagccugcggcgccgacagcuacgagauggaggaggacggcgugagaaagugcaagaagugcgagggccccugcagaaaggugugcaacggcaucggcaucggcgaguucaaggacagccugagcaucaacgccaccaacaucaagcacuucaagaacugcaccagcaucagcggcgaccugcacauccugcccguggccuucagaggcgacagcuucacccacacccccccccuggacccccaggagcuggacauccugaagaccgugaaggagaucaccggcuuccugcugauccaggccuggcccgagaacagaaccgaccugcacgccuucgagaaccuggagaucaucagaggcagaaccaagcagcacggccaguucagccuggccguggugagccugaacaucaccagccugggccugagaagccugaaggagaucagcgacggcgacgugaucaucagcggcaacaagaaccugugcuacgccaacaccaucaacuggaagaagcuguucggcaccagcggccagaagaccaagaucaucagcaacagaggcgagaacagcugcaaggccaccggccaggugugccacgcccugugcagccccgagggcugcuggggccccgagcccagagacugcgugagcugcagaaacgugagcagaggcagagagugcguggacaagugcaaccugcuggagggcgagcccagagaguucguggagaacagcgagugcauccagugccaccccgagugccugccccaggccaugaacaucaccugcaccggcagaggccccgacaacugcauccagugcgcccacuacaucgacggcccccacugcgugaagaccugccccgccggcgugaugggcgagaacaacacccugguguggaaguacgccgacgccggccacgugugccaccugugccaccccaacugcaccuacggcugcaccggccccggccuggagggcugccccaccaacggccccaagauccccagcaucgccaccggcauggugggcgcccugcugcugcugcuggugguggcccugggcaucggccuguucaugagaagaagacacaucgugagaaagagaacccugagaagacugcugcaggagagagagcugguggagccccugacccccagcggcgaggcccccaaccaggcccugcugagaauccugaaggagaccgaguucaagaagaucaaggugcugggcagcggcgccuucggcaccguguacaagggccuguggauccccgagggcgagaaggugaagauccccguggccaucaaggagcugagagaggccaccagccccaaggccaacaaggagauccuggacgaggccuacgugauggccagcguggacaacccccacgugugcagacugcugggcaucugccugaccagcaccgugcagcugaucacccagcugaugcccuucggcugccugcuggacuacgugagagagcacaaggacaacaucggcagccaguaccugcugaacuggugcgugcagaucgccaagggcaugaacuaccuggaggacagaagacuggugcacagagaccuggccgccagaaacgugcuggugaagaccccccagcacgugaagaucaccgacuucggccuggccaagcugcugggcgccgaggagaaggaguaccacgccgagggcggcaaggugcccaucaaguggauggcccuggagagcauccugcacagaaucuacacccaccagagcgacguguggagcuacggcgugaccgugugggagcugaugaccuucggcagcaagcccuacgacggcauccccgccagcgagaucagcagcauccuggagaagggcgagagacugccccagccccccaucugcaccaucgacguguacaugaucauggugaagugcuggaugaucgacgccgacagcagacccaaguucagagagcugaucaucgaguucagcaagauggccagagacccccagagauaccuggugauccagggcgacgagagaaugcaccugcccagccccaccgacagcaacuucuacagagcccugauggacgaggaggacauggacgacgugguggacgccgacgaguaccugaucccccagcagggcuucuucagcagccccagcaccagcagaaccccccugcugagcagccugagcgccaccagcaacaacagcaccguggccugcaucgacagaaacggccugcagagcugccccaucaaggaggacagcuuccugcagagauacagcagcgaccccaccggcgcccugaccgaggacagcaucgacgacaccuuccugcccgugcccgaguacaucaaccagagcgugcccaagagacccgccggcagcgugcagaaccccguguaccacaaccagccccugaaccccgcccccagcagagacccccacuaccaggacccccacagcaccgccgugggcaaccccgaguaccugaacaccgugcagcccaccugcgugaacagcaccuucgacagccccgcccacugggcccagaagggcagccaccagaucagccuggacaaccccgacuaccagcaggacuucuuccccaaggaggccaagcccaacggcaucuucaagggcagcaccgccgagaacgccgaguaccugagaguggccccccagagcagcgaguucaucggcgccuga

SEQ ID NO: 2666 - RNA, 1395 nt, Artificial Sequence
  AAI18666 variant
auggccgccgaggacgugaucaucugcgcccagcagugcagcggcagaugcagaggcaagagccccagcgacugcugccacaaccagugcgccgccggcugcaccggccccagagagagcgacugccuggugugcagaaaguucagagacgaggccaccugcaaggacaccugccccccccugaugcuguacaaccccaccaccuaccagauggacgugaaccccgagggcaaguacagcuucggcgccaccugcgugaagaagugccccagaaacuacguggugaccgaccacggcagcugcgugagagccugcggcgccgacagcuacgagauggaggaggacggcgugagaaagugcaagaagugcgagggccccugcagaaaggugugcaacggcaucggcaucggcgaguucaaggacagccugagcaucaacgccaccaacaucaagcacuucaagaacugcaccagcaucagcggcgaccugcacauccugcccguggccuucagaggcgacagcuucacccacacccccccccuggacccccaggagcuggacauccugaagaccgugaaggagaucaccggcuuccugcugauccaggccuggcccgagaacagaaccgaccugcacgccuucgagaaccuggagaucaucagaggcagaaccaagcagcacggccaguucagccuggccguggugagccugaacaucaccagccugggccugagaagccugaaggagaucagcgacggcgacgugaucaucagcggcaacaagaaccugugcuacgccaacaccaucaacuggaagaagcuguucggcaccagcggccagaagaccaagaucaucagcaacagaggcgagaacagcugcaaggccaccggccaggugugccacgcccugugcagccccgagggcugcuggggccccgagcccagagacugcgugagcugcagaaacgugagcagaggcagagagugcguggacaagugcaaccugcuggagggcgagcccagagaguucguggagaacagcgagugcauccagugccaccccgagugccugccccaggccaugaacaucaccugcaccggcagaggccccgacaacugcauccagugcgcccacuacaucgacggcccccacugcgugaagaccugccccgccggcgugaugggcgagaacaacacccugguguggaaguacgccgacgccggccacgugugccaccugugccaccccaacugcaccuacggcugcaccggccccggccuggagggcugccccaccaacggccccaagauccccagcaucgccaccggcauggugggcgcccugcugcugcugcuggugguggcccugggcaucggcccccugcacggcagauga

SEQ ID NO: 2667 - RNA, 3276 nt, Artificial Sequence
  AAH94761 variant
augagacccagcggcaccgccggcgccgcccugcuggcccugcuggccgcccugugccccgccagcagagcccuggaggagaagaaggugugccagggcaccagcaacaagcugacccagcugggcaccuucgaggaccacuuccugagccugcagagaauguucaacaacugcgagguggugcugggcaaccuggagaucaccuacgugcagagaaacuacgaccugagcuuccugaagaccauccaggagguggccggcuacgugcugaucgcccugaacaccguggagagaaucccccuggagaaccugcagaucaucagaggcaacauguacuacgagaacagcuacgcccuggccgugcugagcaacuacgacgccaacaagaccggccugaaggagcugcccaugagaaaccugcagggccagaagugcgaccccagcugccccaacggcagcugcuggggcgccggcgaggagaacugccagaagcugaccaagaucaucugcgcccagcagugcagcggcagaugcagaggcaagagccccagcgacugcugccacaaccagugcgccgccggcugcaccggccccagagagagcgacugccuggugugcagaaaguucagagacgaggccaccugcaaggacaccugccccccccugaugcuguacaaccccaccaccuaccagauggacgugaaccccgagggcaaguacagcuucggcgccaccugcgugaagaagugccccagaaacuacguggugaccgaccacggcagcugcgugagagccugcggcgccgacagcuacgagauggaggaggacggcgugagaaagugcaagaagugcgagggccccugcagaaaggugugcaacggcaucggcaucggcgaguucaaggacagccugagcaucaacgccaccaacaucaagcacuucaagaacugcaccagcaucagcggcgaccugcacauccugcccguggccuucagaggcgacagcuucacccacacccccccccuggacccccaggagcuggacauccugaagaccgugaaggagaucaccggcuuccugcugauccaggccuggcccgagaacagaaccgaccugcacgccuucgagaaccuggagaucaucagaggcagaaccaagcagcacggccaguucagccuggccguggugagccugaacaucaccagccugggccugagaagccugaaggagaucagcgacggcgacgugaucaucagcggcaacaagaaccugugcuacgccaacaccaucaacuggaagaagcuguucggcaccagcggccagaagaccaagaucaucagcaacagaggcgagaacagcugcaaggccaccggccaggugugccacgcccugugcagccccgagggcugcuggggccccgagcccagagacugcgugagcugcagaaacgugagcagaggcagagagugcguggacaagugcaaccugcuggagggcgagcccagagaguucguggagaacagcgagugcauccagugccaccccgagugccugccccaggccaugaacaucaccugcaccggcagaggccccgacaacugcauccagugcgcccacuacaucgacggcccccacugcgugaagaccugccccgccggcgugaugggcgagaacaacacccugguguggaaguacgccgacgccggccacgugugccaccugugccaccccaacugcaccuacggcugcaccggccccggccuggagggcugccccaccaacggccccaagauccccagcaucgccaccggcauggugggcgcccugcugcugcugcuggugguggcccugggcaucggccuguucaugagaagaagacacaucgugagaaagagaacccugagaagacugcugcaggagagagagcugguggagccccugacccccagcggcgaggcccccaaccaggcccugcugagaauccugaaggagaccgaguucaagaagaucaaggugcugggcagcggcgccuucggcaccguguacaagggccuguggauccccgagggcgagaaggugaagauccccguggccaucaaggagcugagagaggccaccagccccaaggccaacaaggagauccuggacgaggccuacgugauggccagcguggacaacccccacgugugcagacugcugggcaucugccugaccagcaccgugcagcugaucacccagcugaugcccuucggcugccugcuggacuacgugagagagcacaaggacaacaucggcagccaguaccugcugaacuggugcgugcagaucgccaagggcaugaacuaccuggaggacagaagacuggugcacagagaccuggccgccagaaacgugcuggugaagaccccccagcacgugaagaucaccgacuucggccuggccaagcugcugggcgccgaggagaaggaguaccacgccgagggcggcaaggugcccaucaaguggauggcccuggagagcauccugcacagaaucuacacccaccagagcgacguguggagcuacggcgugaccgugugggagcugaugaccuucggcagcaagcccuacgacggcauccccgccagcgagaucagcagcauccuggagaagggcgagagacugccccagccccccaucugcaccaucgacguguacaugaucauggugaagugcuggaugaucgacgccgacagcagacccaaguucagagagcugaucaucgaguucagcaagauggccagagacccccagagauaccuggugauccagggcgacgagagaaugcaccugcccagccccaccgacagcaacuucuacagagcccugauggacgaggaggacauggacgacgugguggacgccgacgaguaccugaucccccagcagggcuucuucagcagccccagcaccagcagaaccccccugcugagcagccugagcgccaccagcaacaacagcaccguggccugcaucgacagaaacggccugcagagcugccccaucaaggaggacagcuuccugcagagauacagcagcgaccccaccggcgcccugaccgaggacagcaucgacgacaccuuccugcccgugcccggcgaguggcugguguggaagcagagcugcagcagcaccagcagcacccacagcgccgccgccagccugcagugccccagccaggugcugccccccgccagccccgagggcgagaccguggccgaccugcagacccaguga

SEQ ID NO: 2668 - RNA, 216 nt, Artificial Sequence
  CAA34902 variant
augagacccagcggcaccgccggcgccgcccugcuggcccugcuggccgcccugugccccgccagcagagcccuggaggagaagaagggcaagggcgugagcagaagacugcccagaagacccagaaucgcccccagaaccccccagcccgcccagcccagaaccggcgcccccgccagagccagagcccccgccagacccuuccuguuccccuga

SEQ ID NO: 2669 - RNA, 720 nt, Artificial Sequence
  AAH10992 variant
augccccugggccacaucaugagacuggaccuggagaagaucgcccuggaguacaucgugcccugccugcacgaggugggcuucugcuaccuggacaacuuccugggcgagguggugggcgacugcgugcuggagagagugaagcagcugcacugcaccggcgcccugagagacggccagcuggccggccccagagccggcgugagcaagagacaccugagaggcgaccagaucaccuggaucggcggcaacgaggagggcugcgaggccaucagcuuccugcugagccugaucgacagacuggugcuguacugcggcagcagacugggcaaguacuacgugaaggagagaagcaaggccaugguggccugcuaccccggcaacggcaccggcuacgugagacacguggacaaccccaacggcgacggcagaugcaucaccugcaucuacuaccugaacaagaacugggacgccaagcugcacggcggcauccugagaaucuuccccgagggcaagagcuucaucgccgacguggagcccaucuucgacagacugcuguucuucuggagcgacagaagaaacccccacgaggugcagcccagcuacgccaccagauacgccaugaccgugugguacuucgacgccgaggagagagccgaggccaagaagaaguucagaaaccugaccagaaagaccgagagcgcccugaccgaggacuga

SEQ ID NO: 2670 - RNA, 1566 nt, Artificial Sequence
  BAH13456 variant
auggccaccagccugcacgagggccccaccaaccagcuggaccugcugaucagagccguggaggccagcgugcacagcagcaacgcccacugcaccgacaagaccaucgaggccgccgaggcccugcugcacauggagagccccaccugccugagagacagcagaagccccgaguucauccacgccgccaugagacccgacgugaucaccgagaccgugguggaggugagcaccgaggagagcgagcccauggacaccagccccauccccaccagccccgacagccacgagcccaugaagaagaagaaggugggcagaaagcccaagacccagcagagccccaucagcaacggcagccccgagcugggcaucaagaagaagcccagagagggcaagggcaacaccaccuaccugugggaguuccugcuggaccugcugcaggacaagaacaccugccccagauacaucaaguggacccagagagagaagggcaucuucaagcugguggacagcaaggccgugagcaagcuguggggcaagcacaagaacaagcccgacaugaacuacgagaccaugggcagagcccugagauacuacuaccagagaggcauccuggccaagguggagggccagagacugguguaccaguucaaggacaugcccaagaacaucguggugaucgacgacgacaagagcgagaccugcaacgaggaccuggccggcaccaccgacgagaagagccuggagagagugagccugagcgccgagagccugcugaaggccgccagcagcgugagaagcggcaagaacagcagccccaucaacugcagcagagccgagaagggcguggccagaguggugaacaucaccagccccggccacgacgccagcagcagaagccccaccaccaccgccagcgugagcgccaccgccgcccccagaaccgugagaguggccaugcaggugcccguggugaugaccagccugggccagaagaucagcaccguggccgugcagagcgugaacgccggcgccccccugaucaccagcaccagccccaccaccgccaccagccccaagguggugauccagaccauccccaccgugaugcccgccagcaccgagaacggcgacaagaucaccaugcagcccgccaagaucaucaccauccccgccacccagcuggcccagugccagcugcagaccaagagcaaccugaccggcagcggcagcaucaacaucgugggcaccccccuggccgugagagcccugacccccgugagcaucgcccacggcacccccgugaugagacugagcaugcccacccagcaggccagcggccagaccccccccagagugaucagcgccgugaucaagggccccgaggugaagagcgaggccguggccaagaagcaggagcacgacgugaagacccugcagcugguggaggagaagcccgccgacggcaacaagaccgugacccacguggugguggugagcgcccccagcgccaucgcccugcccgugaccaugaagaccgagggccuggugaccugcgagaaguga

SEQ ID NO: 2671 - RNA, 810 nt, Artificial Sequence
  BAC67168 variant
auggccgccgcccuguucgugcugcugggcuucgcccugcugggcacccacggcgccagcggcgccgccggcaccguguucaccaccguggaggaccugggcagcaagauccugcugaccugcagccugaacgacagcgccaccgaggugaccggccacagauggcugaagggcggcguggugcugaaggaggacgcccugcccggccagaagaccgaguucaagguggacagcgacgaccaguggggcgaguacagcugcguguuccugcccgagcccaugggcaccgccaacauccagcugcacggcccccccagagugaaggccgugaagagcagcgagcacaucaacgagggcgagaccgccaugcuggugugcaagagcgagagcgugccccccgugaccgacugggccugguacaagaucaccgacagcgaggacaaggcccugaugaacggcagcgagagcagauucuucgugagcagcagccagggcagaagcgagcugcacaucgagaaccugaacauggaggccgaccccggccaguacagaugcaacggcaccagcagcaagggcagcgaccaggccaucaucacccugagagugagaagccaccuggccgcccuguggcccuuccugggcaucguggccgaggugcuggugcuggugaccaucaucuucaucuacgagaagagaagaaagcccgaggacgugcuggacgacgacgacgccggcagcgccccccugaagagcagcggccagcaccagaacgacaagggcaagaacgugagacagagaaacagcagcuga

SEQ ID NO: 2672 - RNA, 945 nt, Artificial Sequence
  AAA35723 variant
auggcccccccccaggugcuggccuucggccugcugcuggccgccgccaccgccaccuucgccgccgcccaggaggagugcgugugcgagaacuacaagcuggccgugaacugcuucgugaacaacaacagacagugccagugcaccagcgugggcgcccagaacaccgugaucugcagcaagcuggccgccaagugccuggugaugaaggccgagaugaacggcagcaagcugggcagaagagccaagcccgagggcgcccugcagaacaacgacggccuguacgaccccgacugcgacgagagcggccuguucaaggccaagcagugcaacggcaccagcaugugcuggugcgugaacaccgccggcgugagaagaaccgacaaggacaccgagaucaccugcagcgagagagugagaaccuacuggaucaucaucgagcugaagcacaaggccagagagaagcccuacgacagcaagagccugagaaccgcccugcagaaggagaucaccaccagauaccagcuggaccccaaguucaucaccagcauccuguacgagaacaacgugaucaccaucgaccuggugcagaacagcagccagaagacccagaacgacguggacaucgccgacguggccuacuacuucgagaaggacgugaagggcgagagccuguuccacagcaagaagauggaccugaccgugaacggcgagcagcuggaccuggaccccggccagacccugaucuacuacguggacgagaaggcccccgaguucagcaugcagggccugaaggccggcgugaucgccgugaucguggugguggugaucgccgugguggccggcaucguggugcuggugaucagcagaaagaagagaauggccaaguacgagaaggccgagaucaaggagaugggcgagaugcacagagagcugaacgccuga

SEQ ID NO: 2673 - RNA, 2931 nt, Artificial Sequence
  CCDS169.1 variant
auggagcugcaggccgccagagccugcuucgcccugcuguggggcugcgcccuggccgccgccgccgccgcccagggcaaggagguggugcugcuggacuucgccgccgccggcggcgagcugggcuggcugacccaccccuacggcaagggcugggaccugaugcagaacaucaugaacgacaugcccaucuacauguacagcgugugcaacgugaugagcggcgaccaggacaacuggcugagaaccaacuggguguacagaggcgaggccgagagaaucuucaucgagcugaaguucaccgugagagacugcaacagcuuccccggcggcgccagcagcugcaaggagaccuucaaccuguacuacgccgagagcgaccuggacuacggcaccaacuuccagaagagacuguucaccaagaucgacaccaucgcccccgacgagaucaccgugagcagcgacuucgaggccagacacgugaagcugaacguggaggagagaagcgugggcccccugaccagaaagggcuucuaccuggccuuccaggacaucggcgccugcguggcccugcugagcgugagaguguacuacaagaagugccccgagcugcugcagggccuggcccacuuccccgagaccaucgccggcagcgacgcccccagccuggccaccguggccggcaccugcguggaccacgccguggugccccccggcggcgaggagcccagaaugcacugcgccguggacggcgaguggcuggugcccaucggccagugccugugccaggccggcuacgagaagguggaggacgccugccaggccugcagccccggcuucuucaaguucgaggccagcgagagccccugccuggagugccccgagcacacccugcccagccccgagggcgccaccagcugcgagugcgaggagggcuucuucagagccccccaggaccccgccagcaugcccugcaccagaccccccagcgccccccacuaccugaccgccgugggcaugggcgccaagguggagcugagauggacccccccccaggacagcggcggcagagaggacaucguguacagcgugaccugcgagcagugcuggcccgagagcggcgagugcggccccugcgaggccagcgugagauacagcgagcccccccacggccugaccagaaccagcgugaccgugagcgaccuggagccccacaugaacuacaccuucaccguggaggccagaaacggcgugagcggccuggugaccagcagaagcuucagaaccgccagcgugagcaucaaccagaccgagccccccaaggugagacuggagggcagaagcaccaccagccugagcgugagcuggagcaucccccccccccagcagagcagaguguggaaguacgaggugaccuacagaaagaagggcgacagcaacagcuacaacgugagaagaaccgagggcuucagcgugacccuggacgaccuggcccccgacaccaccuaccuggugcaggugcaggcccugacccaggagggccagggcgccggcagcaaggugcacgaguuccagacccugagccccgagggcagcggcaaccuggccgugaucggcggcguggccgugggcguggugcugcugcuggugcuggccggcgugggcuucuucauccacagaagaagaaagaaccagagagccagacagagccccgaggacguguacuucagcaagagcgagcagcugaagccccugaagaccuacguggacccccacaccuacgaggaccccaaccaggccgugcugaaguucaccaccgagauccaccccagcugcgugaccagacagaaggugaucggcgccggcgaguucggcgagguguacaagggcaugcugaagaccagcagcggcaagaaggaggugcccguggccaucaagacccugaaggccggcuacaccgagaagcagagaguggacuuccugggcgaggccggcaucaugggccaguucagccaccacaacaucaucagacuggagggcgugaucagcaaguacaagcccaugaugaucaucaccgaguacauggagaacggcgcccuggacaaguuccugagagagaaggacggcgaguucagcgugcugcagcuggugggcaugcugagaggcaucgccgccggcaugaaguaccuggccaacaugaacuacgugcacagagaccuggccgccagaaacauccuggugaacagcaaccuggugugcaaggugagcgacuucggccugagcagagugcuggaggacgaccccgaggccaccuacaccaccagcggcggcaagauccccaucagauggaccgcccccgaggccaucagcuacagaaaguucaccagcgccagcgacguguggagcuucggcaucgugaugugggaggugaugaccuacggcgagagacccuacugggagcugagcaaccacgaggugaugaaggccaucaacgacggcuucagacugcccacccccauggacugccccagcgccaucuaccagcugaugaugcagugcuggcagcaggagagagccagaagacccaaguucgccgacaucgugagcauccuggacaagcugaucagagcccccgacagccugaagacccuggccgacuucgaccccagagugagcaucagacugcccagcaccagcggcagcgagggcgugcccuucagaaccgugagcgaguggcuggagagcaucaagaugcagcaguacaccgagcacuucauggccgccggcuacaccgccaucgagaagguggugcagaugaccaacgacgacaucaagagaaucggcgugagacugcccggccaccagaagagaaucgccuacagccugcugggccugaaggaccaggugaacaccgugggcauccccaucuga

SEQ ID NO: 2674 - RNA, 2952 nt, Artificial Sequence
  AAG43576 variant
auggacugccagcugagcauccugcugcugcugagcugcagcgugcuggacagcuucggcgagcugaucccccagcccagcaacgaggugaaccugcuggacagcaagaccauccagggcgagcugggcuggaucagcuaccccagccacggcugggaggagaucagcggcguggacgagcacuacacccccaucagaaccuaccaggugugcaacgugauggaccacagccagaacaacuggcugagaaccaacugggugcccagaaacagcgcccagaagaucuacguggagcugaaguucacccugagagacugcaacagcaucccccuggugcugggcaccugcaaggagaccuucaaccuguacuacauggagagcgacgacgaccacggcgugaaguucagagagcaccaguucaccaagaucgacaccaucgccgccgacgagagcuucacccagauggaccugggcgacagaauccugaagcugaacaccgagaucagagaggugggccccgugaacaagaagggcuucuaccuggccuuccaggacgugggcgccugcguggcccuggugagcgugagaguguacuucaagaagugccccuucaccgugaagaaccuggccauguuccccgacaccgugcccauggacagccagagccugguggaggugagaggcagcugcgugaacaacagcaaggaggaggacccccccagaauguacugcagcaccgagggcgaguggcuggugcccaucggcaagugcagcugcaacgccggcuacgaggagagaggcuucaugugccaggccugcagacccggcuucuacaaggcccuggacggcaacaugaagugcgccaagugccccccccacagcagcacccaggaggacggcagcaugaacugcagaugcgagaacaacuacuucagagccgacaaggacccccccagcauggccugcaccagaccccccagcagccccagaaacgugaucagcaacaucaacgagaccagcgugauccuggacuggagcuggccccuggacaccggcggcagaaaggacgugaccuucaacaucaucugcaagaagugcggcuggaacaucaagcagugcgagcccugcagccccaacgugagauuccugcccagacaguucggccugaccaacaccaccgugaccgugaccgaccugcuggcccacaccaacuacaccuucgagaucgacgccgugaacggcgugagcgagcugagcagcccccccagacaguucgccgccgugagcaucaccaccaaccaggccgcccccagccccgugcugaccaucaagaaggacagaaccagcagaaacagcaucagccugagcuggcaggagcccgagcaccccaacggcaucauccuggacuacgaggugaaguacuacgagaagcaggagcaggagaccagcuacaccauccugagagccagaggcaccaacgugaccaucagcagccugaagcccgacaccaucuacguguuccagaucagagccagaaccgccgccggcuacggcaccaacagcagaaaguucgaguucgagaccagccccgacagcuucagcaucagcggcgagagcagccagguggugaugaucgccaucagcgccgccguggccaucauccugcugaccguggugaucuacgugcugaucggcagauucugcggcuacaagagcaagcacggcgccgacgagaagagacugcacuucggcaacggccaccugaagcugcccggccugagaaccuacguggacccccacaccuacgaggaccccacccaggccgugcacgaguucgccaaggagcuggacgccaccaacaucagcaucgacaagguggugggcgccggcgaguucggcgaggugugcagcggcagacugaagcugcccagcaagaaggagaucagcguggccaucaagacccugaaggugggcuacaccgagaagcagagaagagacuuccugggcgaggccagcaucaugggccaguucgaccaccccaacaucaucagacuggagggcguggugaccaagagcaagcccgugaugaucgugaccgaguacauggagaacggcagccuggacagcuuccugagaaagcacgacgcccaguucaccgugauccagcuggugggcaugcugagaggcaucgccagcggcaugaaguaccugagcgacaugggcuacgugcacagagaccuggccgccagaaacauccugaucaacagcaaccuggugugcaaggugagcgacuucggccugagcagagugcuggaggacgaccccgaggccgccuacaccaccagaggcggcaagauccccaucagauggaccagccccgaggccaucgccuacagaaaguucaccagcgccagcgacguguggagcuacggcaucgugcugugggaggugaugagcuacggcgagagacccuacugggagaugagcaaccaggacgugaucaaggccguggacgagggcuacagacugcccccccccauggacugccccgccgcccuguaccagcugaugcuggacugcuggcagaaggacagaaacaacagacccaaguucgagcagaucgugagcauccuggacaagcugaucagaaaccccggcagccugaagaucaucaccagcgccgccgccagacccagcaaccugcugcuggaccagagcaacguggacaucaccaccuucagaaccaccggcgacuggcugaacggcguguggaccgcccacugcaaggagaucuucaccggcguggaguacagcagcugcgacaccaucgccaagaucagcaccgacgacaugaagaaggugggcgugaccguggugggcccccagaagaagaucaucagcagcaucaaggcccuggagacccagagcaagaacggccccgugcccguguga

SEQ ID NO: 2675 - RNA, 2952 nt, Artificial Sequence
  AAH63282 variant
auggacugccagcugagcauccugcugcugcugagcugcagcgugcuggacagcuucggcgagcugaucccccagcccagcaacgaggugaaccugcuggacagcaagaccauccagggcgagcugggcuggaucagcuaccccagccacggcugggaggagaucagcggcguggacgagcacuacacccccaucagaaccuaccaggugugcaacgugauggaccacagccagaacaacuggcugagaaccaacugggugcccagaaacagcgcccagaagaucuacguggagcugaaguucacccugagagacugcaacagcaucccccuggugcugggcaccugcaaggagaccuucaaccuguacuacauggagagcgacgacgaccacggcgugaaguucagagagcaccaguucaccaagaucgacaccaucgccgccgacgagagcuucacccagauggaccugggcgacagaauccugaagcugaacaccgagaucagagaggugggccccgugaacaagaagggcuucuaccuggccuuccaggacgugggcgccugcguggcccuggugagcgugagaguguacuucaagaagugccccuucaccgugaagaaccuggccauguuccccgacaccgugcccauggacagccagagccugguggaggugagaggcagcugcgugaacaacagcaaggaggaggacccccccagaauguacugcagcaccgagggcgaguggcuggugcccaucggcaagugcagcugcaacgccggcuacgaggagagaggcuucaugugccaggccugcagacccggcuucuacaaggcccuggacggcaacaugaagugcgccaagugccccccccacagcagcacccaggaggacggcagcaugaacugcagaugcgagaacaacuacuucagagccgacaaggacccccccagcauggccugcaccagaccccccagcagccccagaaacgugaucagcaacaucaacgagaccagcgugauccuggacuggagcuggccccuggacaccggcggcagaaaggacgugaccuucaacaucaucugcaagaagugcggcuggaacaucaagcagugcgagcccugcagccccaacgugagauuccugcccagacaguucggccugaccaacaccaccgugaccgugaccgaccugcuggcccacaccaacuacaccuucgagaucgacgccgugaacggcgugagcgagcugagcagcccccccagacaguucgccgccgugagcaucaccaccaaccaggccgcccccagccccgugcugaccaucaagaaggacagaaccagcagaaacagcaucagccugagcuggcaggagcccgagcaccccaacggcaucauccuggacuacgaggugaaguacuacgagaagcaggagcaggagaccagcuacaccauccugagagccagaggcaccaacgugaccaucagcagccugaagcccgacaccaucuacguguuccagaucagagccagaaccgccgccggcuacggcaccaacagcagaaaguucgaguucgagaccagccccgacagcuucagcaucagcggcgagagcagccagguggugaugaucgccaucagcgccgccguggccaucauccugcugaccguggugaucuacgugcugaucggcagauucugcggcuacaagagcaagcacggcgccgacgagaagagacugcacuucggcaacggccaccugaagcugcccggccugagaaccuacguggacccccacaccuacgaggaccccacccagaccgugcacgaguucgccaaggagcuggacgccaccaacaucagcaucgacaagguggugggcgccggcgaguucggcgaggugugcagcggcagacugaagcugcccagcaagaaggagaucagcguggccaucaagacccugaaggugggcuacaccgagaagcagagaagagacuuccugggcgaggccagcaucaugggccaguucgaccaccccaacaucaucagacuggagggcguggugaccaagagcaagcccgugaugaucgugaccgaguacauggagaacggcagccuggacagcuuccugagaaagcacgacgcccaguucaccgugauccagcuggugggcaugcugagaggcaucgccagcggcaugaaguaccugagcgacaugggcuacgugcacagagaccuggccgccagaaacauccugaucaacagcaaccuggugugcaaggugagcgacuucggccugagcagagugcuggaggacgaccccgaggccgccuacaccaccagaggcggcaagauccccaucagauggaccagccccgaggccaucgccuacagaaaguucaccagcgccagcgacguguggagcuacggcaucgugcugugggaggugaugagcuacggcgagagacccuacugggagaugagcaaccaggacgugaucaaggccguggacgagggcuacagacugcccccccccauggacugccccgccgcccuguaccagcugaugcuggacugcuggcagaaggacagaaacaacagacccaaguucgagcagaucgugagcauccuggacaagcugaucagaaaccccggcagccugaagaucaucaccagcgccgccgccagacccagcaaccugcugcuggaccagagcaacguggacaucaccaccuucagaaccaccggcgacuggcugaacggcguguggaccgcccacugcaaggagaucuucaccggcguggaguacagcagcugcgacaccaucgccaagaucagcaccgacgacaugaagaaggugggcgugaccguggugggcccccagaagaagaucaucagcagcaucaaggcccuggagacccagagcaagaacggccccgugcccguguga

SEQ ID NO: 2676 - RNA, 1389 nt, Artificial Sequence
  BAG54127 variant
augcccaugagcaccauccugcccgugaccagccccugccugcccgccaccggcgugaccgugugggagcugaugaccuucggcgccgagcccuacgccggccugagacuggccgaggugcccgaccugcuggagaagggcgagagacuggcccagccccagaucugcaccaucgacguguacauggugauggugaagugcuggaugaucgacgagaacaucagacccaccuucaaggagcuggccaacgaguucaccagaauggccagagacccccccagauaccuggugaucaagagagagagcggccccggcaucgcccccggccccgagccccacggccugaccaacaagaagcuggaggagguggagcuggagcccgagcuggaccuggaccuggaccuggaggccgaggaggacaaccuggccaccaccacccugggcagcgcccugagccugcccgugggcacccugaacagacccagaggcagccagagccugcugagccccagcagcggcuacaugcccaugaaccagggcaaccugggcgagagcugccaggagagcgccgugagcggcagcagcgagagaugccccagacccgugagccugcaccccaugcccagaggcugccuggccagcgagagcagcgagggccacgugaccggcagcgaggccgagcugcaggagaaggugagcaugugcagaagcagaagcagaagcagaagccccagacccagaggcgacagcgccuaccacagccagagacacagccugcugacccccgugaccccccugagcccccccggccuggaggaggaggacgugaacggcuacgugaugcccgacacccaccugaagggcacccccagcagcagagagggcacccugagcagcgugggccugagcagcgugcugggcaccgaggaggaggacgaggacgaggaguacgaguacaugaacagaagaagaagacacagccccccccacccccccagacccagcagccuggaggagcugggcuacgaguacauggacgugggcagcgaccugagcgccagccugggcagcacccagagcugcccccugcaccccgugcccaucaugcccaccgccggcaccacccccgacgaggacuacgaguacaugaacagacagagagacggcggcggccccggcggcgacuacgccgccaugggcgccugccccgccagcgagcagggcuacgaggagaugagagccuuccagggccccggccaccaggccccccacgugcacuacgccagacugaagacccugagaagccuggaggccaccgacagcgccuucgacaaccccgacuacuggcacagcagacuguuccccaaggccaacgcccagagaaccuga

SEQ ID NO: 2677 - RNA, 2766 nt, Artificial Sequence
  BAG57868 variant
augagagccaacgacgcccugcaggugcugggccugcuguucagccuggccagaggcagcgaggugggcaacagccaggccgugugccccggcacccugaacggccugagcgugaccggcgacgccgagaaccaguaccagacccuguacaagcuguacgagagaugcgagguggugaugggcaaccuggagaucgugcugaccggccacaacgccgaccugagcuuccugcaguggaucagagaggugaccggcuacgugcugguggccaugaacgaguucagcacccugccccugcccaaccugagaguggugagaggcacccagguguacgacggcaaguucgccaucuucgugaugcugaacuacaacaccaacagcagccacgcccugagacagcugagacugacccagcugaccgagauccugagcggcggcguguacaucgagaagaacgacaagcugugccacauggacaccaucgacuggagagacaucgugagagacagagacgccgagaucguggugaaggacaacggcagaagcugcccccccugccacgaggugugcaagggcagaugcuggggccccggcagcgaggacugccagacccugaccaagaccaucugcgccccccagugcaacggccacugcuucggccccaaccccaaccagugcugccacgacgagugcgccggcggcugcagcggcccccaggacaccgacugcuucgccugcagacacuucaacgacagcggcgccugcgugcccagaugcccccagccccugguguacaacaagcugaccuuccagcuggagcccaacccccacaccaaguaccaguacggcggcgugugcguggccagcugcccccacaacuucgugguggaccagaccagcugcgugagagccugcccccccgacaagauggagguggacaagaacggccugaagaugugcgagcccugcggcggccugugccccaaggccugcgagggcaccggcagcggcagcagauuccagaccguggacagcagcaacaucgacggcuucgugaacugcaccaagauccugggcaaccuggacuuccugaucaccggccugaacggcgaccccuggcacaagauccccgcccuggaccccgagaagcugaacguguucagaaccgugagagagaucaccggcuaccugaacauccagagcuggcccccccacaugcacaacuucagcguguucagcaaccugaccaccaucggcggcagaagccuguacaacagaggcuucagccugcugaucaugaagaaccugaacgugaccagccugggcuucagaagccugaaggagaucagcgccggcagaaucuacaucagcgccaacagacagcugugcuaccaccacagccugaacuggaccaaggugcugagaggccccaccgaggagagacuggacaucaagcacaacagacccagaagagacugcguggccgagggcaaggugugcgacccccugugcagcagcggcggcugcuggggccccggccccggccagugccugagcugcagaaacuacagcagaggcggcgugugcgugacccacugcaacuuccugaacggcgagcccagagaguucgcccacgaggccgagugcuucagcugccaccccgagugccagcccauggagggcaccgccaccugcaacggcagcggcagcgacaccugcgcccagugcgcccacuucagagacggcccccacugcgugagcagcugcccccacggcgugcugggcgccaagggccccaucuacaaguaccccgacgugcagaacgagugcagacccugccacgagaacugcacccagggcugcaagggccccgagcugcaggacugccugggccagacccuggugcugaucggcaagacccaccugaccauggcccugaccgugaucgccggccugguggugaucuucaugaugcugggcggcaccuuccuguacuggagaggcagaagaauccagaacaagagagccaugagaagauaccuggagagaggcgagagcaucgagccccuggaccccagcgagaaggccaacaaggugcuggccagaaucuucaaggagaccgagcugagaaagcugaaggugcugggcagcggcguguucggcaccgugcacaagggcguguggauccccgagggcgagagcaucaagauccccgugugcaucaaggugaucgaggacaagagcggcagacagagcuuccaggccgugaccgaccacaugcuggccaucggcagccuggaccacgcccacaucgugagacugcugggccugugccccggcagcagccugcagcuggugacccaguaccugccccugggcagccugcuggaccacgugagacagcacagaggcgcccugggcccccagcugcugcugaacuggggcgugcagaucgccaagggcauguacuaccuggaggagcacggcauggugcacagaaaccuggccgccagaaacgugcugcugaagagccccagccaggugcagguggccgacuucggcguggccgaccugcugccccccgacgacaagcagcugcuguacagcgaggccaagacccccaucaaguggauggcccuggagagcauccacuucggcaaguacacccaccagagcgacguguggagcuacggccagugcaucuggaugcccagccugcccagccuggcccccgugagcaaccugcccuucgagacccccagcuga

SEQ ID NO: 2678 - RNA, 3927 nt, Artificial Sequence
  AAB59446 variant
augaagcccgccaccggccugugggugugggugagccugcugguggccgccggcaccgugcagcccagcgacagccagagcgugugcgccggcaccgagaacaagcugagcagccugagcgaccuggagcagcaguacagagcccugagaaaguacuacgagaacugcgagguggugaugggcaaccuggagaucaccagcaucgagcacaacagagaccugagcuuccugagaagcgugagagaggugaccggcuacgugcugguggcccugaaccaguucagauaccugccccuggagaaccugagaaucaucagaggcaccaagcuguacgaggacagauacgcccuggccaucuuccugaacuacagaaaggacggcaacuucggccugcaggagcugggccugaagaaccugaccgagauccugaacggcggcguguacguggaccagaacaaguuccugugcuacgccgacaccauccacuggcaggacaucgugagaaaccccuggcccagcaaccugacccuggugagcaccaacggcagcagcggcugcggcagaugccacaagagcugcaccggcagaugcuggggccccaccgagaaccacugccagacccugaccagaaccgugugcgccgagcagugcgacggcagaugcuacggccccuacgugagcgacugcugccacagagagugcgccggcggcugcagcggccccaaggacaccgacugcuucgccugcaugaacuucaacgacagcggcgccugcgugacccagugcccccagaccuucguguacaaccccaccaccuuccagcuggagcacaacuucaacgccaaguacaccuacggcgccuucugcgugaagaagugcccccacaacuucgugguggacagcagcagcugcgugagagccugccccagcagcaagauggagguggaggagaacggcaucaagaugugcaagcccugcaccgacaucugccccaaggccugcgacggcaucggcaccggcagccugaugagcgcccagaccguggacagcagcaacaucgacaaguucaucaacugcaccaagaucaacggcaaccugaucuuccuggugaccggcauccacggcgaccccuacaacgccaucgaggccaucgaccccgagaagcugaacguguucagaaccgugagagagaucaccggcuuccugaacauccagagcuggccccccaacaugaccgacuucagcguguucagcaaccuggugaccaucggcggcagagugcuguacagcggccugagccugcugauccugaagcagcagggcaucaccagccugcaguuccagagccugaaggagaucagcgccggcaacaucuacaucaccgacaacagcaaccugugcuacuaccacaccaucaacuggaccacccuguucagcaccaucaaccagagaaucgugaucagagacaacagaaaggccgagaacugcaccgccgagggcauggugugcaaccaccugugcagcagcgacggcugcuggggccccggccccgaccagugccugagcugcagaagauucagcagaggcagaaucugcaucgagagcugcaaccuguacgacggcgaguucagagaguucgagaacggcagcaucugcguggagugcgacccccagugcgagaagauggaggacggccugcugaccugccacggccccggccccgacaacugcaccaagugcagccacuucaaggacggccccaacugcguggagaagugccccgacggccugcagggcgccaacagcuucaucuucaaguacgccgaccccgacagagagugccaccccugccaccccaacugcacccagggcugcaacggccccaccagccacgacugcaucuacuaccccuggaccggccacagcacccugccccagcacgccagaaccccccugaucgccgccggcgugaucggcggccuguucauccuggugaucgugggccugaccuucgccguguacgugagaagaaagagcaucaagaagaagagagcccugagaagauuccuggagaccgagcugguggagccccugacccccagcggcaccgcccccaaccaggcccagcugagaauccugaaggagaccgagcugaagagagugaaggugcugggcagcggcgccuucggcaccguguacaagggcaucugggugcccgagggcgagaccgugaagauccccguggccaucaagauccugaacgagaccaccggccccaaggccaacguggaguucauggacgaggcccugaucauggccagcauggaccacccccaccuggugagacugcugggcgugugccugagccccaccauccagcuggugacccagcugaugccccacggcugccugcuggaguacgugcacgagcacaaggacaacaucggcagccagcugcugcugaacuggugcgugcagaucgccaagggcaugauguaccuggaggagagaagacuggugcacagagaccuggccgccagaaacgugcuggugaagagccccaaccacgugaagaucaccgacuucggccuggccagacugcuggagggcgacgagaaggaguacaacgccgacggcggcaagaugcccaucaaguggauggcccuggagugcauccacuacagaaaguucacccaccagagcgacguguggagcuacggcgugaccaucugggagcugaugaccuucggcggcaagcccuacgacggcauccccaccagagagauccccgaccugcuggagaagggcgagagacugccccagccccccaucugcaccaucgacguguacauggugauggugaagugcuggaugaucgacgccgacagcagacccaaguucaaggagcuggccgccgaguucagcagaauggccagagacccccagagauaccuggugauccagggcgacgacagaaugaagcugcccagccccaacgacagcaaguucuuccagaaccugcuggacgaggaggaccuggaggacaugauggacgccgaggaguaccuggugccccaggccuucaacauccccccccccaucuacaccagcagagccagaaucgacagcaacagaagcgagaucggccacagccccccccccgccuacacccccaugagcggcaaccaguucguguacagagacggcggcuucgccgccgagcagggcgugagcgugcccuacagagcccccaccagcaccauccccgaggcccccguggcccagggcgccaccgccgagaucuucgacgacagcugcugcaacggcacccugagaaagcccguggccccccacgugcaggaggacagcagcacccagagauacagcgccgaccccaccguguucgcccccgagagaagccccagaggcgagcuggacgaggagggcuacaugacccccaugagagacaagcccaagcaggaguaccugaaccccguggaggagaaccccuucgugagcagaagaaagaacggcgaccugcaggcccuggacaaccccgaguaccacaacgccagcaacggcccccccaaggccgaggacgaguacgugaacgagccccuguaccugaacaccuucgccaacacccugggcaaggccgaguaccugaagaacaacauccugagcaugcccgagaaggccaagaaggccuucgacaaccccgacuacuggaaccacagccugccccccagaagcacccugcagcaccccgacuaccugcaggaguacagcaccaaguacuucuacaagcagaacggcagaaucagacccaucguggccgagaaccccgaguaccugagcgaguucagccugaagcccggcaccgugcugccccccccccccuacagacacagaaacaccgugguguga

SEQ ID NO: 2679 - RNA, 1461 nt, Artificial Sequence
  CCDS46648.1 variant
augauccagaccgugcccgaccccgccgcccacaucaaggaggcccugagcguggugagcgaggaccagagccuguucgagugcgccuacggcaccccccaccuggccaagaccgagaugaccgccagcagcagcagcgacuacggccagaccagcaagaugagccccagagugccccagcaggacuggcugagccagccccccgccagagugaccaucaagauggagugcaaccccagccaggugaacggcagcagaaacagccccgacgagugcagcguggccaagggcggcaagauggugggcagccccgacaccgugggcaugaacuacggcagcuacauggaggagaagcacaugcccccccccaacaugaccaccaacgagagaagagugaucgugcccgccgaccccacccuguggagcaccgaccacgugagacaguggcuggagugggccgugaaggaguacggccugcccgacgugaacauccugcuguuccagaacaucgacggcaaggagcugugcaagaugaccaaggacgacuuccagagacugacccccagcuacaacgccgacauccugcugagccaccugcacuaccugagagagaccccccugccccaccugaccagcgacgacguggacaaggcccugcagaacagccccagacugaugcacgccagaaacaccggcggcgccgccuucaucuuccccaacaccagcguguaccccgaggccacccagagaaucaccaccagacccgaccugcccuacgagccccccagaagaagcgccuggaccggccacggccaccccaccccccagagcaaggccgcccagcccagccccagcaccgugcccaagaccgaggaccagagaccccagcuggaccccuaccagauccugggccccaccagcagcagacuggccaaccccggcagcggccagauccagcuguggcaguuccugcuggagcugcugagcgacagcagcaacagcagcugcaucaccugggagggcaccaacggcgaguucaagaugaccgaccccgacgagguggccagaagauggggcgagagaaagagcaagcccaacaugaacuacgacaagcugagcagagcccugagauacuacuacgacaagaacaucaugaccaaggugcacggcaagagauacgccuacaaguucgacuuccacggcaucgcccaggcccugcagccccacccccccgagagcagccuguacaaguaccccagcgaccugcccuacaugggcagcuaccacgcccacccccagaagaugaacuucguggccccccacccccccgcccugcccgugaccagcagcagcuucuucgccgcccccaaccccuacuggaacagccccaccggcggcaucuaccccaacaccagacugcccaccagccacaugcccagccaccugggcaccuacuacuga

SEQ ID NO: 2680 - RNA, 1359 nt, Artificial Sequence
  AAA19786 variant
augagcgagacccccgcccagugcagcaucaagcaggagagaaucagcuacaccccccccgagagccccgugcccagcuacgccagcagcaccccccugcacgugcccgugcccagagcccugagaauggaggaggacagcaucagacugcccgcccaccugagacugcagcccaucuacuggagcagagacgacguggcccaguggcugaagugggccgagaacgaguucagccugagacccaucgacagcaacaccuucgagaugaacggcaaggcccugcugcugcugaccaaggaggacuucagauacagaagcccccacagcggcgacgugcuguacgagcugcugcagcacauccugaagcagagaaagcccagaauccuguucagccccuucuuccaccccggcaacagcauccacacccagcccgaggugauccugcaccagaaccacgaggaggacaacugcgugcagagaacccccagacccagcguggacaacgugcaccacaacccccccaccaucgagcugcugcacagaagcagaagccccaucaccaccaaccacagacccagccccgaccccgagcagagaccccugagaagcccccuggacaacaugaucagaagacugagccccgccgagagagcccagggccccagaccccaccaggagaacaaccaccaggagagcuacccccugagcgugagccccauggagaacaaccacugccccgccagcagcgagagccaccccaagcccagcagccccagacaggagagcaccagagugauccagcugaugcccagccccaucaugcacccccugauccugaaccccagacacagcguggacuucaagcagagcagacugagcgaggacggccugcacagagagggcaagcccaucaaccugagccacagagaggaccuggccuacaugaaccacaucauggugagcgugagcccccccgaggagcacgccaugcccaucggcagaaucgccgacugcagacugcugugggacuacguguaccagcugcugagcgacagcagauacgagaacuucaucagaugggaggacaaggagagcaagaucuucagaaucguggaccccaacggccuggccagacuguggggcaaccacaagaacagaaccaacaugaccuacgagaagaugagcagagcccugagacacuacuacaagcugaacaucaucagaaaggagcccggccagagacugcuguucagauucaugaagacccccgacgagaucaugagcggcagaaccgacagacuggagcaccuggagagccaggagcuggacgagcagaucuaccaggaggacgagugcuga

SEQ ID NO: 2681 - RNA, 1971 nt, Artificial Sequence
  AAH04817 variant
auggccagcaccgacuacagcaccuacagccaggccgccgcccagcagggcuacagcgccuacaccgcccagcccacccagggcuacgcccagaccacccaggccuacggccagcagagcuacggcaccuacggccagcccaccgacgugagcuacacccaggcccagaccaccgccaccuacggccagaccgccuacgccaccagcuacggccagccccccaccggcuacaccacccccaccgccccccaggccuacagccagcccgugcagggcuacggcaccggcgccuacgacaccaccaccgccaccgugaccaccacccaggccagcuacgccgcccagagcgccuacggcacccagcccgccuaccccgccuacggccagcagcccgccgccaccgcccccaccagaccccaggacggcaacaagcccaccgagaccagccagccccagagcagcaccggcggcuacaaccagcccagccugggcuacggccagagcaacuacagcuacccccaggugcccggcagcuaccccaugcagcccgugaccgccccccccagcuacccccccaccagcuacagcagcacccagcccaccagcuacgaccagagcagcuacagccagcagaacaccuacggccagcccagcagcuacggccagcagagcagcuacggccagcagagcagcuacggccagcagccccccaccagcuaccccccccagaccggcagcuacagccaggcccccagccaguacagccagcagagcagcagcuacggccagcagagcagcuucagacaggaccaccccagcagcaugggcguguacggccaggagagcggcggcuucagcggccccggcgagaacagaagcaugagcggccccgacaacagaggcagaggcagaggcggcuucgacagaggcggcaugagcagaggcggcagaggcggcggcagaggcggcaugggcagcgccggcgagagaggcggcuucaacaagcccggcggccccauggacgagggccccgaccuggaccugggcccccccguggaccccgacgaggacagcgacaacagcgccaucuacgugcagggccugaacgacagcgugacccuggacgaccuggccgacuucuucaagcagugcggcguggugaagaugaacaagagaaccggccagcccaugauccacaucuaccuggacaaggagaccggcaagcccaagggcgacgccaccgugagcuacgaggacccccccaccgccaaggccgccguggagugguucgacggcaaggacuuccagggcagcaagcugaaggugagccuggccagaaagaagccccccaugaacagcaugagaggcggccugccccccagagagggcagaggcaugccccccccccugagaggcggccccggcggccccggcggccccggcggccccaugggcagaaugggcggcagaggcggcgacagaggcggcuucccccccagaggccccagaggcagcagaggcaaccccagcggcggcggcaacgugcagcacagagccggcgacuggcagugccccaaccccggcugcggcaaccagaacuucgccuggagaaccgagugcaaccagugcaaggcccccaagcccgagggcuuccugcccccccccuuccccccccccggcggcgacagaggcagaggcggccccggcggcaugagaggcggcagaggcggccugauggacagaggcggccccggcggcauguucagaggcggcagaggcggcgacagaggcggcuucagaggcggcagaggcauggacagaggcggcuucggcggcggcagaagaggcggccccggcggcccccccggcccccugauggagcagaugggcggcagaagaggcggcagaggcggccccggcaagauggacaagggcgagcacagacaggagagaagagacagacccuacuga

SEQ ID NO: 2682 - RNA, 1998 nt, Artificial Sequence
  AEA07595 variant
augggccagaccggcaagaagagcgagaagggccccgugugcuggagaaagagagugaagagcgaguacaugagacugagacagcugaagagauucagaagagccgacgaggugaagagcauguucagcagcaacagacagaagauccuggagagaaccgagauccugaaccaggaguggaagcagagaagaauccagcccgugcacauccugaccagcgugagcagccugagaggcaccagagagguggaggacgagaccgugcugcacaacauccccuacaugggcgacgaggugcuggaccaggacggcaccuucaucgaggagcugaucaagaacuacgacggcaaggugcacggcgacagagagugcggcuucaucaacgacgagaucuucguggagcuggugaacgcccugggccaguacaacgacgacgacgacgacgacgacggcgacgaccccgaggagagagaggagaagcagaaggaccuggaggaccacagagacgacaaggagagcagaccccccagaaaguuccccagcgacaagaucuucgaggccaucagcagcauguuccccgacaagggcaccgccgaggagcugaaggagaaguacaaggagcugaccgagcagcagcugcccggcgcccugccccccgagugcacccccaacaucgacggccccaacgccaagagcgugcagagagagcagagccugcacagcuuccacacccuguucugcagaagaugcuucaaguacgacugcuuccugcaccccuuccacgccacccccaacaccuacaagagaaagaacaccgagaccgcccuggacaacaagcccugcggcccccagugcuaccagcaccuggagggcgccaaggaguucgccgccgcccugaccgccgagagaaucaagaccccccccaagagacccggcggcagaagaagaggcagacugcccaacaacagcagcagacccagcacccccaccaucaacgugcuggagagcaaggacaccgacagcgacagagaggccggcaccgagaccggcggcgagaacaacgacaaggaggaggaggagaagaaggacgagaccagcagcagcagcgaggccaacagcagaugccagacccccaucaagaugaagcccaacaucgagccccccgagaacguggaguggagcggcgccgaggccagcauguucagagugcugaucggcaccuacuacgacaacuucugcgccaucgccagacugaucggcaccaagaccugcagacagguguacgaguucagagugaaggagagcagcaucaucgcccccgcccccgccgaggacguggacaccccccccagaaagaagaagagaaagcacagacugugggccgcccacugcagaaagauccagcugaagaagggccagaacagauuccccggcugcagaugcaaggcccagugcaacaccaagcagugccccugcuaccuggccgugagagagugcgaccccgaccugugccugaccugcggcgccgccgaccacugggacagcaagaacgugagcugcaagaacugcagcauccagagaggcagcaagaagcaccugcugcuggcccccagcgacguggccggcuggggcaucuucaucaaggaccccgugcagaagaacgaguucaucagcgaguacugcggcgagaucaucagccaggacgaggccgacagaagaggcaagguguacgacaaguacaugugcagcuuccuguucaaccugaacaacgacuucgugguggacgccaccagaaagggcaacaagaucagauucgccaaccacagcgugaaccccaacugcuacgccaaggugaugauggugaacggcgaccacagaaucggcaucuucgccaagagagccauccagaccggcgaggagcuguucuucgacuacagauacagccaggccgacgcccugaaguacgugggcaucgagagagagauggagauccccuga

SEQ ID NO: 2683 - RNA, 1005 nt, Artificial Sequence
  EAW80068 variant
augggccagaccggcaagaagagcgagaagggccccgugugcuggagaaagagagugaagagcgaguacaugagacugagacagcugaagagauucagaagagccgacgaggugaagagcauguucagcagcaacagacagaagauccuggagagaaccgagauccugaaccaggaguggaagcagagaagaauccagcccgugcacauccugaccagcgugagcagccugagaggcaccagagagugcagcgugaccagcgaccuggacuuccccacccaggugaucccccugaagacccugaacgccguggccagcgugcccaucauguacagcuggagcccccugcagcagaacuucaugguggaggacgagaccgugcugcacaacauccccuacaugggcgacgaggugcuggaccaggacggcaccuucaucgaggagcugaucaagaacuacgacggcaaggugcacggcgacagagagugcggcuucaucaacgacgagaucuucguggagcuggugaacgcccugggccaguacaacgacgacgacgacgacgacgacggcgacgaccccgaggagagagaggagaagcagaaggaccuggaggaccacagagacgacaaggagagcagaccccccagaaaguuccccagcgacaagaucuucgaggccaucagcagcauguuccccgacaagggcaccgccgaggagcugaaggagaaguacaaggagcugaccgagcagcagcugcccggcgcccugccccccgagugcacccccaacaucgacggccccaacgccaagagcgugcagagagagcagagccugcacagcuuccacacccuguucugcagaagaugcuucaaguacgacugcuuccugcaccccuuccacgccacccccaacaccuacaagagaaagaacaccgagaccgcccuggacaacaagcccugcggcccccagugcuaccagcaccugccccugcugcccagaaacuga

SEQ ID NO: 2684 - RNA, 195 nt, Artificial Sequence
  CCO13726 variant
augccccuggugaacaucaugaugaugaccaugaugaugauggagaccauccugaagaaggagaagaagagcagaaagaucuggagaaucaccgagaugaucaagaaggccgcccaccugggcaacuuccugcugaucaaguuccugaagcccuucccccagugcuuccagaucagagcccagcagaagaacuga

SEQ ID NO: 2685 - RNA, 2241 nt, Artificial Sequence
  AAC51520 variant
augggccagaccggcaagaagagcgagaagggccccgugugcuggagaaagagagugaagagcgaguacaugagacugagacagcugaagagauucagaagagccgacgaggugaagagcauguucagcagcaacagacagaagauccuggagagaaccgagauccugaaccaggaguggaagcagagaagaauccagcccgugcacauccugaccagcgugagcagccugagaggcaccagagagugcagcgugaccagcgaccuggacuuccccacccaggugaucccccugaagacccugaacgccguggccagcgugcccaucauguacagcuggagcccccugcagcagaacuucaugguggaggacgagaccgugcugcacaacauccccuacaugggcgacgaggugcuggaccaggacggcaccuucaucgaggagcugaucaagaacuacgacggcaaggugcacggcgacagagagugcggcuucaucaacgacgagaucuucguggagcuggugaacgcccugggccaguacaacgacgacgacgacgacgacgacggcgacgaccccgaggagagagaggagaagcagaaggaccuggaggaccacagagacgacaaggagagcagaccccccagaaaguuccccagcgacaagaucuucgaggccaucagcagcauguuccccgacaagggcaccgccgaggagcugaaggagaaguacaaggagcugaccgagcagcagcugcccggcgcccugccccccgagugcacccccaacaucgacggccccaacgccaagagcgugcagagagagcagagccugcacagcuuccacacccuguucugcagaagaugcuucaaguacgacugcuuccugcaccccuuccacgccacccccaacaccuacaagagaaagaacaccgagaccgcccuggacaacaagcccugcggcccccagugcuaccagcaccuggagggcgccaaggaguucgccgccgcccugaccgccgagagaaucaagaccccccccaagagacccggcggcagaagaagaggcagacugcccaacaacagcagcagacccagcacccccaccaucaacgugcuggagagcaaggacaccgacagcgacagagaggccggcaccgagaccggcggcgagaacaacgacaaggaggaggaggagaagaaggacgagaccagcagcagcagcgaggccaacagcagaugccagacccccaucaagaugaagcccaacaucgagccccccgagaacguggaguggagcggcgccgaggccagcauguucagagugcugaucggcaccuacuacgacaacuucugcgccaucgccagacugaucggcaccaagaccugcagacagguguacgaguucagagugaaggagagcagcaucaucgcccccgcccccgccgaggacguggacaccccccccagaaagaagaagagaaagcacagacugugggccgcccacugcagaaagauccagcugaagaaggacggcagcagcaaccacguguacaacuaccagcccugcgaccaccccagacagcccugcgacagcagcugccccugcgugaucgcccagaacuucugcgagaaguucugccagugcagcagcgagugccagaacagauuccccggcugcagaugcaaggcccagugcaacaccaagcagugccccugcuaccuggccgugagagagugcgaccccgaccugugccugaccugcggcgccgccgaccacugggacagcaagaacgugagcugcaagaacugcagcauccagagaggcagcaagaagcaccugcugcuggcccccagcgacguggccggcuggggcaucuucaucaaggaccccgugcagaagaacgaguucaucagcgaguacugcggcgagaucaucagccaggacgaggccgacagaagaggcaagguguacgacaaguacaugugcagcuuccuguucaaccugaacaacgacuucgugguggacgccaccagaaagggcaacaagaucagauucgccaaccacagcgugaaccccaacugcuacgccaaggugaugauggugaacggcgaccacagaaucggcaucuucgccaagagagccauccagaccggcgaggagcuguucuucgacuacagauacagccaggccgacgcccugaaguacgugggcaucgagagagagauggagauccccuga

SEQ ID NO: 2686 - RNA, 2124 nt, Artificial Sequence
  AEN79481 variant
augggccagaccggcaagaagagcgagaagggccccgugugcuggagaaagagagugaagagcgaguacaugagacugagacagcugaagagauucagaagagccgacgaggugaagagcauguucagcagcaacagacagaagauccuggagagaaccgagauccugaaccaggaguggaagcagagaagaauccagcccgugcacauccugaccagcgugagcagccugagaggcaccagagagguggaggacgagaccgugcugcacaacauccccuacaugggcgacgaggugcuggaccaggacggcaccuucaucgaggagcugaucaagaacuacgacggcaaggugcacggcgacagagagugcggcuucaucaacgacgagaucuucguggagcuggugaacgcccugggccaguacaacgacgacgacgacgacgacgacggcgacgaccccgaggagagagaggagaagcagaaggaccuggaggaccacagagacgacaaggagagcagaccccccagaaaguuccccagcgacaagaucuucgaggccaucagcagcauguuccccgacaagggcaccgccgaggagcugaaggagaaguacaaggagcugaccgagcagcagcugcccggcgcccugccccccgagugcacccccaacaucgacggccccaacgccaagagcgugcagagagagcagagccugcacagcuuccacacccuguucugcagaagaugcuucaaguacgacugcuuccugcaccccuuccacgccacccccaacaccuacaagagaaagaacaccgagaccgcccuggacaacaagcccugcggcccccagugcuaccagcaccuggagggcgccaaggaguucgccgccgcccugaccgccgagagaaucaagaccccccccaagagacccggcggcagaagaagaggcagacugcccaacaacagcagcagacccagcacccccaccaucaacgugcuggagagcaaggacaccgacagcgacagagaggccggcaccgagaccggcggcgagaacaacgacaaggaggaggaggagaagaaggacgagaccagcagcagcagcgaggccaacagcagaugccagacccccaucaagaugaagcccaacaucgagccccccgagaacguggaguggagcggcgccgaggccagcauguucagagugcugaucggcaccuacuacgacaacuucugcgccaucgccagacugaucggcaccaagaccugcagacagguguacgaguucagagugaaggagagcagcaucaucgcccccgcccccgccgaggacguggacaccccccccagaaagaagaagagaaagcacagacugugggccgcccacugcagaaagauccagcugaagaaggacggcagcagcaaccacguguacaacuaccagcccugcgaccaccccagacagcccugcgacagcagcugccccugcgugaucgcccagaacuucugcgagaaguucugccagugcagcagcgagugccagaacagauuccccggcugcagaugcaaggcccagugcaacaccaagcagugccccugcuaccuggccgugagagagugcgaccccgaccugugccugaccugcggcgccgccgaccacugggacagcaagaacgugagcugcaagaacugcagcauccagagaggcagcaagaagcaccugcugcuggcccccagcgacguggccggcuggggcaucuucaucaaggaccccgugcagaagaacgaguucaucagcgaguacugcggcgagaucaucagccaggacgaggccgacagaagaggcaagguguacgacaaguacaugugcagcuuccuguucaaccugaacaacgacuucgugguggacgccaccagaaagggcaacaagaucagauucgccaaccacagcgugaaccccaacugcuacgccaaggugaugauggugaacggcgaccacagaaucggcaucuucgccaagagagccauccagaccggcgaggagcuguucuucgacuacagauacagccaggccgacgcccugaaguacgugggcaucgagagagagauggagauccccuga

SEQ ID NO: 2687 - RNA, 399 nt, Artificial Sequence
  AAB87141 variant
augguggaggccuucugcgccaccuggaagcugaccaacagccagaacuucgacgaguacaugaaggcccugggcgugggcuucgccaccagacaggugggcaacgugaccaagcccaccgugaucaucagccaggagggcgacaagguggugaucagaacccugagcaccuucaagaacaccgagaucagcuuccagcugggcgaggaguucgacgagaccaccgccgacgacagaaacugcaagagcguggugagccuggacggcgacaagcuggugcacauccagaagugggacggcaaggagaccaacuucgugagagagaucaaggacggcaagauggugaugacccugaccuucggcgacgugguggccgugagacacuacgagaaggccuga

SEQ ID NO: 2688 - RNA, 765 nt, Artificial Sequence
  CAA36870 variant
auguggcagcugcugcugcccaccgcccugcugcugcuggugagcgccggcaugagaaccgaggaccugcccaaggccgugguguuccuggagccccagugguacagagugcuggagaaggacagcgugacccugaagugccagggcgccuacagccccgaggacaacagcacccagugguuccacaacgagagccugaucagcagccaggccagcagcuacuucaucgacgccgccaccguggacgacagcggcgaguacagaugccagaccaaccugagcacccugagcgaccccgugcagcuggaggugcacaucggcuggcugcugcugcaggcccccagauggguguucaaggaggaggaccccauccaccugagaugccacagcuggaagaacaccgcccugcacaaggugaccuaccugcagaacggcaagggcagaaaguacuuccaccacaacagcgacuucuacauccccaaggccacccugaaggacagcggcagcuacuucugcagaggccuguucggcagcaagaacgugagcagcgagaccgugaacaucaccaucacccagggccuggccgugagcaccaucagcagcuucuucccccccggcuaccaggugagcuucugccuggugauggugcugcuguucgccguggacaccggccuguacuucagcgugaagaccaacaucagaagcagcaccagagacuggaaggaccacaaguucaaguggagaaaggacccccaggacaaguga

SEQ ID NO: 2689 - RNA, 873 nt, Artificial Sequence
  CCDS1232.1 variant
augggcggcggcgccggcgagagacuguucaccagcagcugccuggugggccuggugccccugggccugagaaucagccuggugaccugcccccugcagugcggcaucauguggcagcugcugcugcccaccgcccugcugcugcuggugagcgccggcaugagaaccgaggaccugcccaaggccgugguguuccuggagccccagugguacagagugcuggagaaggacagcgugacccugaagugccagggcgccuacagccccgaggacaacagcacccagugguuccacaacgagagccugaucagcagccaggccagcagcuacuucaucgacgccgccaccguggacgacagcggcgaguacagaugccagaccaaccugagcacccugagcgaccccgugcagcuggaggugcacaucggcuggcugcugcugcaggcccccagauggguguucaaggaggaggaccccauccaccugagaugccacagcuggaagaacaccgcccugcacaaggugaccuaccugcagaacggcaagggcagaaaguacuuccaccacaacagcgacuucuacauccccaaggccacccugaaggacagcggcagcuacuucugcagaggccuguucggcagcaagaacgugagcagcgagaccgugaacaucaccaucacccagggccuggccgugagcaccaucagcagcuucuucccccccggcuaccaggugagcuucugccuggugauggugcugcuguucgccguggacaccggccuguacuucagcgugaagaccaacaucagaagcagcaccagagacuggaaggaccacaaguucaaguggagaaaggacccccaggacaaguga

SEQ ID NO: 2690 - RNA, 807 nt, Artificial Sequence
  AAH74858 variant
augagccugagcuuccugcugcugcuguucuucagccaccugauccugagcgccugggcccacggcgagaagagacuggcccccaagggccagcccggccccgccgccaccgacagaaaccccagaggcagcagcagcagacagagcagcagcagcgccaugagcagcagcagcgccagcagcagccccgccgccagccugggcagccagggcagcggccuggagcagagcagcuuccaguggagccccagcggcagaagaaccggcagccuguacugcagagugggcaucggcuuccaccugcagaucuaccccgacggcaaggugaacggcagccacgaggccaacaugcugagcgugcuggagaucuucgccgugagccagggcaucgugggcaucagaggcguguucagcaacaaguuccuggccaugagcaagaagggcaagcugcacgccagcgccaaguucaccgacgacugcaaguucagagagagauuccaggagaacagcuacaacaccuacgccagcgccauccacagaaccgagaagaccggcagagagugguacguggcccugaacaagagaggcaaggccaagagaggcugcagccccagagugaagccccagcacaucagcacccacuuccugcccagauucaagcagagcgagcagcccgagcugagcuucaccgugaccgugcccgagaagaagaagccccccagccccaucaagcccaagaucccccugagcgcccccagaaagaacaccaacagcgugaaguacagacugaaguucagauucggcuga

SEQ ID NO: 2691 - RNA, 117 nt, Artificial Sequence
  AAB06462 variant
augagcaccagaugcggcgaggccggcagagccagaggcacccagccccacagaggcuacagagcccagaaccagcccuacaagaugcaccugggcccccccagacuggaggaguga

SEQ ID NO: 2692 - RNA, 2466 nt, Artificial Sequence
  AAA59470 variant
auggugagcuggggcagauucaucugccuggugguggugaccauggccacccugagccuggccagacccagcuucagccugguggaggacaccacccuggagcccgaggagccccccaccaaguaccagaucagccagcccgagguguacguggccgcccccggcgagagccuggaggugagaugccugcugaaggacgccgccgugaucagcuggaccaaggacggcgugcaccugggccccaacaacagaaccgugcugaucggcgaguaccugcagaucaagggcgccacccccagagacagcggccuguacgccugcaccgccagcagaaccguggacagcgagaccugguacuucauggugaacgugaccgacgccaucagcagcggcgacgacgaggacgacaccgacggcgccgaggacuucgugagcgagaacagcaacaacaagagagcccccuacuggaccaacaccgagaagauggagaagagacugcacgccgugcccgccgccaacaccgugaaguucagaugccccgccggcggcaaccccaugcccaccaugagauggcugaagaacggcaaggaguucaagcaggagcacagaaucggcggcuacaaggugagaaaccagcacuggagccugaucauggagagcguggugcccagcgacaagggcaacuacaccugcgugguggagaacgaguacggcagcaucaaccacaccuaccaccuggacgugguggagagaagcccccacagacccauccugcaggccggccugcccgccaacgccagcaccguggugggcggcgacguggaguucgugugcaagguguacagcgacgcccagccccacauccaguggaucaagcacguggagaagaacggcagcaaguacggccccgacggccugcccuaccugaaggugcugaaggccgccggcgugaacaccaccgacaaggagaucgaggugcuguacaucagaaacgugaccuucgaggacgccggcgaguacaccugccuggccggcaacagcaucggcaucagcuuccacagcgccuggcugaccgugcugcccgcccccggcagagagaaggagaucaccgccagccccgacuaccuggagaucgccaucuacugcaucggcguguuccugaucgccugcaugguggugaccgugauccugugcagaaugaagaacaccaccaagaagcccgacuucagcagccagcccgccgugcacaagcugaccaagagaaucccccugagaagacaggugaccgugagcgccgagagcagcagcagcaugaacagcaacaccccccuggugagaaucaccaccagacugagcagcaccgccgacacccccaugcuggccggcgugagcgaguacgagcugcccgaggaccccaagugggaguuccccagagacaagcugacccugggcaagccccugggcgagggcugcuucggccagguggugauggccgaggccgugggcaucgacaaggacaagcccaaggaggccgugaccguggccgugaagaugcugaaggacgacgccaccgagaaggaccugagcgaccuggugagcgagauggagaugaugaagaugaucggcaagcacaagaacaucaucaaccugcugggcgccugcacccaggacggcccccuguacgugaucguggaguacgccagcaagggcaaccugagagaguaccugagagccagaagaccccccggcauggaguacagcuacgacaucaacagagugcccgaggagcagaugaccuucaaggaccuggugagcugcaccuaccagcuggccagaggcauggaguaccuggccagccagaagugcauccacagagaccuggccgccagaaacgugcuggugaccgagaacaacgugaugaagaucgccgacuucggccuggccagagacaucaacaacaucgacuacuacaagaagaccaccaacggcagacugcccgugaaguggauggcccccgaggcccuguucgacagaguguacacccaccagagcgacguguggagcuucggcgugcugaugugggagaucuucacccugggcggcagccccuaccccggcauccccguggaggagcuguucaagcugcugaaggagggccacagaauggacaagcccgccaacugcaccaacgagcuguacaugaugaugagagacugcuggcacgccgugcccagccagagacccaccuucaagcagcugguggaggaccuggacagaauccugacccugaccaccaacgaggaguaccuggaccugagccagccccuggagcaguacagccccagcuaccccgacaccagaagcagcugcagcagcggcgacgacagcguguucagccccgaccccaugcccuacgagcccugccugccccaguacccccacaucaacggcagcgugaagaccuga

SEQ ID NO: 2693 - RNA, 1908 nt, Artificial Sequence
  EAW74574 variant
auggcccccccccugcugcugcugcugcuggccagcggcgccgccgccugcccccugcccugcgugugccagaaccugagcgagagccugagcacccugugcgcccacagaggccugcuguucgugccccccaacguggacagaagaaccguggagcugagacuggccgacaacuucauccaggcccugggcccccccgacuucagaaacaugaccggccugguggaccugacccugagcagaaacgccaucaccagaaucggcgccagagccuucggcgaccuggagagccugagaagccugcaccuggacggcaacagacugguggagcugggcaccggcagccugagaggccccgugaaccugcagcaccugauccugagcggcaaccagcugggcagaaucgcccccggcgccuucgacgacuuccuggagagccuggaggaccuggaccugagcuacaacaaccugagacaggugcccugggccggcaucggcgccaugcccgcccugcacacccugaaccuggaccacaaccugaucgacgcccugccccccggcgccuucgcccagcugggccagcugagcagacuggaccugaccagcaacagacuggccacccuggcccccgacccccuguucagcagaggcagagacgccgaggccagccccgccccccuggugcugagcuucagcggcaacccccugcacugcaacugcgagcugcuguggcugagaagacuggccagacccgacgaccuggagaccugcgccagcccccccggccuggccggcagauacuucugggccgugcccgagggcgaguucagcugcgagcccccccugaucgccagacacacccagagacugugggugcuggagggccagagagccacccugagaugcagagcccugggcgaccccgcccccaccaugcacugggugggccccgacgacagacuggugggcaacagcagcagagccagagccuuccccaacggcacccuggagaucggcgugaccggcgccggcgacgccggcggcuacaccugcaucgccaccaaccccgccggcgaggccaccgccagaguggagcugagagugcuggcccugccccacggcggcaacagcagcgccgagggcggcagacccggccccagcgacaucgccgccagcgccagaaccgccgccgagggcgagggcacccuggagagcgagcccgccgugcaggugaccgaggugaccgccaccagcggccuggugagcuggggccccggcagacccgccgaccccguguggauguuccagauccaguacaacagcagcgaggacgagacccugaucuacagaaucgugcccgccagcagccaccacuuccugcugaagcaccuggugcccggcgccgacuacgaccugugccugcuggcccugagccccgccgccggccccagcgaccugaccgccaccagacugcugggcugcgcccacuucagcacccugcccgccagcccccugugccacgcccugcaggcccacgugcugggcggcacccugaccguggccgugggcggcgugcugguggccgcccugcugguguucaccguggcccugcuggugagaggcagaggcgccggcaacggcagacugccccugaagcugagccacgugcagagccagaccaacggcggccccagccccacccccaaggcccacccccccagaagccccccccccagaccccagagaagcugcagccuggaccugggcgacgccggcugcuacggcuacgccagaagacugggcggcgccugggccagaagaagccacagcgugcacggcggccugcugggcgccggcugcagaggcgugggcggcagcgccgagagacuggaggagagcgugguguga

SEQ ID NO: 2694 - RNA, 3297 nt, Artificial Sequence
  EAW96782 variant
augccccccagacagccccccagacaggccggcggcggccugagcagagaguucggcaagcugcugcccgcccugagccacagcccccugggcggccugggcagcggcagcggcagcguggcccccggccagggcagagccggcgccaugggcagcagaacccccgagagcccccugcacgccgugcagcugagauggggccccagaagaagacccccccugcugccccugcugcugcugcugcugccccccccccccagagugggcggcuucaaccuggacgccgaggcccccgccgugcugagcggcccccccggcagcuucuucggcuucagcguggaguucuacagacccggcaccgacggcgugagcgugcuggugggcgcccccaaggccaacaccagccagcccggcgugcugcagggcggcgccguguaccugugccccuggggcgccagccccacccagugcacccccaucgaguucgacagcaagggcagcagacugcuggagagcagccugagcagcagcgagggcgaggagcccguggaguacaagagccugcagugguucggcgccaccgugagagcccacggcagcagcauccuggccugcgccccccuguacagcuggagaaccgagaaggagccccugagcgaccccgugggcaccugcuaccugagcaccgacaacuucaccagaauccuggaguacgcccccugcagaagcgacuucagcugggccgccggccagggcuacugccagggcggcuucagcgccgaguucaccaagaccggcagaguggugcugggcggccccggcagcuacuucuggcagggccagauccugagcgccacccaggagcagaucgccgagagcuacuaccccgaguaccugaucaaccuggugcagggccagcugcagaccagacaggccagcagcaucuacgacgacagcuaccugggcuacagcguggccgugggcgaguucagcggcgacgacaccgaggacuucguggccggcgugcccaagggcaaccugaccuacggcuacgugaccauccugaacggcagcgacaucagaagccuguacaacuucagcggcgagcagauggccagcuacuucggcuacgccguggccgccaccgacgugaacggcgacggccuggacgaccugcuggugggcgccccccugcugauggacagaacccccgacggcagaccccaggaggugggcagaguguacguguaccugcagcaccccgccggcaucgagcccacccccacccugacccugaccggccacgacgaguucggcagauucggcagcagccugaccccccugggcgaccuggaccaggacggcuacaacgacguggccaucggcgcccccuucggcggcgagacccagcagggcgugguguucguguuccccggcggccccggcggccugggcagcaagcccagccaggugcugcagccccugugggccgccagccacacccccgacuucuucggcagcgcccugagaggcggcagagaccuggacggcaacggcuaccccgaccugaucgugggcagcuucggcguggacaaggccgugguguacagaggcagacccaucgugagcgccagcgccagccugaccaucuuccccgccauguucaaccccgaggagagaagcugcagccuggagggcaaccccguggccugcaucaaccugagcuucugccugaacgccagcggcaagcacguggccgacagcaucggcuucaccguggagcugcagcuggacuggcagaagcagaagggcggcgugagaagagcccuguuccuggccagcagacaggccacccugacccagacccugcugauccagaacggcgccagagaggacugcagagagaugaagaucuaccugagaaacgagagcgaguucagagacaagcugagccccauccacaucgcccugaacuucagccuggacccccaggcccccguggacagccacggccugagacccgcccugcacuaccagagcaagagcagaaucgaggacaaggcccagauccugcuggacugcggcgaggacaacaucugcgugcccgaccugcagcuggagguguucggcgagcagaaccacguguaccugggcgacaagaacgcccugaaccugaccuuccacgcccagaacgugggcgagggcggcgccuacgaggccgagcugagagugaccgccccccccgaggccgaguacagcggccuggugagacaccccggcaacuucagcagccugagcugcgacuacuucgccgugaaccagagcagacugcuggugugcgaccugggcaaccccaugaaggccggcgccagccuguggggcggccugagauucaccgugccccaccugagagacaccaagaagaccauccaguucgacuuccagauccugagcaagaaccugaacaacagccagagcgacguggugagcuucagacugagcguggaggcccaggcccaggugacccugaacggcgugagcaagcccgaggccgugcuguuccccgugagcgacuggcaccccagagaccagccccagaaggaggaggaccugggccccgccgugcaccacguguacgagcugaucaaccagggccccagcagcaucagccagggcgugcuggagcugagcugcccccaggcccuggagggccagcagcugcuguacgugaccagagugaccggccugaacugcaccaccaaccaccccaucaaccccaagggccuggagcuggaccccgagggcagccugcaccaccagcagaagagagaggcccccagcagaagcagcgccagcagcggcccccagauccugaagugccccgaggccgagugcuucagacugagaugcgagcugggcccccugcaccagcaggagagccagagccugcagcugcacuucagagugugggccaagaccuuccugcagagagagcaccagcccuucagccugcagugcgaggccguguacaaggcccugaagaugcccuacagaauccugcccagacagcugccccagaaggagagacagguggccaccgccgugcaguggaccaaggccgagggcagcuacggcgugccccuguggaucaucauccuggccauccuguucggccugcugcugcugggccugcugaucuacauccuguacaagcugggcuucuucaagagaagccugcccuacggcaccgccauggagaaggcccagcugaagccccccgccaccagcgacgccuga

SEQ ID NO: 2695 - RNA, 3597 nt, Artificial Sequence
  EAX08808 variant
auggccgagcaccccccccugcuggacaccacccagauccugagcagcgacaucagccugcugagcgcccccaucgugagcgccgacggcacccagcaggugauccuggugcaggugaaccccggcgaggccuucaccaucagaagagaggacggccaguuccagugcaucaccggccccgcccaggugcccaugaugagccccaacggcagcgugccccccaucuacgugccccccggcuacgccccccaggugaucgaggacaacggcgugagaagaguggugguggugccccaggcccccgaguuccaccccggcagccacaccgugcugcacagaagcccccaccccccccugcccggcuucauccccgugcccaccaugaugccccccccccccagacacauguacagccccgugaccggcgccggcgacaugaccacccaguacaugccccaguaccagagcagccagguguacggcgacguggacgcccacagcacccacggcagaagcaacuucagagacgagagaagcagcaagaccuacgagagacugcagaagaagcugaaggacagacagggcacccagaaggacaagaugagcagcccccccagcagcccccagaagugccccagccccaucaacgagcacaacggccugaucaagggccagaucgccggcggcaucaacaccggcagcgccaagaucaagagcggcaagggcaagggcggcacccagguggacaccgagaucgaggagaaggacgaggagaccaaggccuucgaggcccugcugagcaacaucgugaagcccguggccagcgacauccaggccagaaccguggugcugaccuggagcccccccagcagccugaucaacggcgagaccgacgagagcagcgugcccgagcuguacggcuacgaggugcugaucagcagcaccggcaaggacggcaaguacaagagcguguacgugggcgaggagaccaacaucacccugaacgaccugaagcccgccauggacuaccacgccaaggugcaggccgaguacaacagcaucaagggcacccccagcgaggccgagaucuucaccacccugagcugcgagcccgacauccccaacccccccagaaucgccaacagaaccaagaacagccugacccugcaguggaaggcccccagcgacaacggcagcaagauccagaacuucgugcuggagugggacgagggcaagggcaacggcgaguucugccagugcuacaugggcagccagaagcaguucaagaucaccaagcugagccccgccaugggcugcaaguucagacugagcgccagaaacgacuacggcaccagcggcuucagcgaggaggugcuguacuacaccagcggcugcgcccccagcaugcccgccagccccgugcugaccaaggccggcaucaccuggcugagccugcaguggagcaagcccagcggcacccccagcgacgagggcaucagcuacauccuggagauggaggaggagaccagcggcuacggcuucaagcccaaguacgacggcgaggaccuggccuacaccgugaagaaccugagaagaagcaccaaguacaaguucaaggugaucgccuacaacagcgagggcaagagcaaccccagcgaggugguggaguucaccaccugccccgacaagcccggcauccccgugaagcccagcgugaagggcaagauccacagccacagcuucaagaucaccugggacccccccaaggacaacggcggcgccaccaucaacaaguacgugguggagauggccgagggcagcaacggcaacaagugggagaugaucuacagcggcgccaccagagagcaccugugcgacagacugaaccccggcugcuucuacagacugagaguguacugcaucagcgacggcggccagagcgccgugagcgagagccugcuggugcagacccccgccgugccccccggccccugccugccccccagacugcagggcagacccaaggccaaggagauccagcugagauggggccccccccugguggacggcggcagccccaucagcugcuacagcguggagaugagccccaucgagaaggacgagcccagagagguguaccagggcagcgagguggagugcaccgugagcagccugcugcccggcaagaccuacagcuucagacugagagccgccaacaagaugggcuucggccccuucagcgagaagugcgacaucaccaccgcccccggcccccccgaccagugcaagcccccccaggugaccugcagaagcgccaccugcgcccaggugaacugggaggugccccugagcaacggcaccgacgugaccgaguacagacuggaguggggcggcguggagggcagcaugcagaucugcuacugcggccccggccugagcuacgagaucaagggccugagccccgccaccaccuacuacugcagagugcaggcccugagcguggugggcgccggccccuucagcgaggugguggccugcgugaccccccccagcgugcccggcaucgugaccugccugcaggagaucagcgacgacgagaucgagaacccccacuacagccccagcaccugccuggccaucagcugggagaagcccugcgaccacggcagcgagauccuggccuacagcaucgacuucggcgacaagcagagccugaccgugggcaaggugaccagcuacaucaucaacaaccugcagcccgacaccaccuacagaaucagaauccaggcccugaacagccugggcgccggccccuucagccacaugaucaagcugaagaccaagccccugccccccgacccccccagacuggagugcguggccuucagccaccagaaccugaagcugaaguggggcgagggcacccccaagacccugagcaccgacagcauccaguaccaccugcagauggaggacaagaacggcagauucgugagccuguacagaggccccugccacaccuacaaggugcagagacugaacgagagcaccagcuacaaguucugcauccaggccugcaacgaggccggcgagggcccccugagccaggaguacaucuucaccacccccaagagcgugcccgccgcccugaaggcccccaagaucgagaaggugaacgaccacaucugcgagaucaccugggagugccugcagcccaugaagggcgaccccgugaucuacagccugcaggugaugcugggcaaggacagcgaguucaagcagaucuacaagggccccgacagcagcuucagauacagcagccugcagcugaacugcgaguacagauucagagugugcgccaucagacagugccaggacagccugggccaccaggaccuggugggccccuacagcaccaccgugcuguucaucagccagagaaccgagccccccgccagcaccaacagagacaccguggagagcaccagaaccagaagagcccugagcgacgagcagugcgccgccgugauccuggugcuguucgccuucuucagcauccugaucgccuucaucauccaguacuucgugaucaaguga

SEQ ID NO: 2696 - RNA, 3429 nt, Artificial Sequence
  EAX08809 variant
augagcggccccgcccaggugcccaugaugagccccaacggcagcgugccccccaucuacgugccccccggcuacgccccccaggugaucgaggacaacggcgugagaagaguggugguggugccccaggcccccgaguuccaccccggcagccacaccgugcugcacagaagcccccaccccccccugcccggcuucauccccgugcccaccaugaugccccccccccccagacacauguacagccccgugaccggcgccggcgacaugaccacccaguacaugccccaguaccagagcagccagguguacggcgacguggacgcccacagcacccacggcagaagcaacuucagagacgagagaagcagcaagaccuacgagagacugcagaagaagcugaaggacagacagggcacccagaaggacaagaugagcagcccccccagcagcccccagaagugccccagccccaucaacgagcacaacggccugaucaagggccagaucgccggcggcaucaacaccggcagcgccaagaucaagagcggcaagggcaagggcggcacccagguggacaccgagaucgaggagaaggacgaggagaccaaggccuucgaggcccugcugagcaacaucgugaagcccguggccagcgacauccaggccagaaccguggugcugaccuggagcccccccagcagccugaucaacggcgagaccgacgagagcagcgugcccgagcuguacggcuacgaggugcugaucagcagcaccggcaaggacggcaaguacaagagcguguacgugggcgaggagaccaacaucacccugaacgaccugaagcccgccauggacuaccacgccaaggugcaggccgaguacaacagcaucaagggcacccccagcgaggccgagaucuucaccacccugagcugcgagcccgacauccccaacccccccagaaucgccaacagaaccaagaacagccugacccugcaguggaaggcccccagcgacaacggcagcaagauccagaacuucgugcuggagugggacgagggcaagggcaacggcgaguucugccagugcuacaugggcagccagaagcaguucaagaucaccaagcugagccccgccaugggcugcaaguucagacugagcgccagaaacgacuacggcaccagcggcuucagcgaggaggugcuguacuacaccagcggcugcgcccccagcaugcccgccagccccgugcugaccaaggccggcaucaccuggcugagccugcaguggagcaagcccagcggcacccccagcgacgagggcaucagcuacauccuggagauggaggaggagaccagcggcuacggcuucaagcccaaguacgacggcgaggaccuggccuacaccgugaagaaccugagaagaagcaccaaguacaaguucaaggugaucgccuacaacagcgagggcaagagcaaccccagcgaggugguggaguucaccaccugccccgacaagcccggcauccccgugaagcccagcgugaagggcaagauccacagccacagcuucaagaucaccugggacccccccaaggacaacggcggcgccaccaucaacaaguacgugguggagauggccgagggcagcaacggcaacaagugggagaugaucuacagcggcgccaccagagagcaccugugcgacagacugaaccccggcugcuucuacagacugagaguguacugcaucagcgacggcggccagagcgccgugagcgagagccugcuggugcagacccccgccgugccccccggccccugccugccccccagacugcagggcagacccaaggccaaggagauccagcugagauggggccccccccugguggacggcggcagccccaucagcugcuacagcguggagaugagccccaucgagaaggacgagcccagagagguguaccagggcagcgagguggagugcaccgugagcagccugcugcccggcaagaccuacagcuucagacugagagccgccaacaagaugggcuucggccccuucagcgagaagugcgacaucaccaccgcccccggcccccccgaccagugcaagcccccccaggugaccugcagaagcgccaccugcgcccaggugaacugggaggugccccugagcaacggcaccgacgugaccgaguacagacuggaguggggcggcguggagggcagcaugcagaucugcuacugcggccccggccugagcuacgagaucaagggccugagccccgccaccaccuacuacugcagagugcaggcccugagcguggugggcgccggccccuucagcgaggugguggccugcgugaccccccccagcgugcccggcaucgugaccugccugcaggagaucagcgacgacgagaucgagaacccccacuacagccccagcaccugccuggccaucagcugggagaagcccugcgaccacggcagcgagauccuggccuacagcaucgacuucggcgacaagcagagccugaccgugggcaaggugaccagcuacaucaucaacaaccugcagcccgacaccaccuacagaaucagaauccaggcccugaacagccugggcgccggccccuucagccacaugaucaagcugaagaccaagccccugccccccgacccccccagacuggagugcguggccuucagccaccagaaccugaagcugaaguggggcgagggcacccccaagacccugagcaccgacagcauccaguaccaccugcagauggaggacaagaacggcagauucgugagccuguacagaggccccugccacaccuacaaggugcagagacugaacgagagcaccagcuacaaguucugcauccaggccugcaacgaggccggcgagggcccccugagccaggaguacaucuucaccacccccaagagcgugcccgccgcccugaaggcccccaagaucgagaaggugaacgaccacaucugcgagaucaccugggagugccugcagcccaugaagggcgaccccgugaucuacagccugcaggugaugcugggcaaggacagcgaguucaagcagaucuacaagggccccgacagcagcuucagauacagcagccugcagcugaacugcgaguacagauucagagugugcgccaucagacagugccaggacagccugggccaccaggaccuggugggccccuacagcaccaccgugcuguucaucagccagagaaccgagccccccgccagcaccaacagagacaccguggagagcaccagaaccagaagagcccugagcgacgagcagugcgccgccgugauccuggugcuguucgccuucuucagcauccugaucgccuucaucauccaguacuucgugaucaaguga

SEQ ID NO: 2697 - RNA, 1020 nt, Artificial Sequence
  EAW49214 variant
augccccccagcaagccccacccccccguggugggcaaggugacccaccacagcaucgagcuguacugggaccuggagaagaaggccaagagacagggcccccaggagcagugguucagauucagcaucgaggaggaggaccccaagaugcacaccuacggcaucaucuacaccggcuacgccaccaagcacgugguggagggccuggagcccagaacccuguacagauucagacugaaggugaccagccccagcggcgagugcgaguacagcccccuggugagcgugagcaccaccagagagcccaucagcagcgagcaccugcacagagccgugagcgugaacgacgaggaccugcuggugagaauccugcagggcggcagagugaagguggacgugcccaacaaguucggcuucaccgcccugaugguggccgcccagaagggcuacaccagacuggugaagauccuggugagcaacggcaccgacgugaaccugaagaacggcagcggcaaggacagccugaugcuggccugcuacgccggccaccuggacguggugaaguaccugagaagacacggcgccagcuggcaggccagagaccugggcggcugcaccgcccugcacugggccgccgacggcggccacugcagcgugaucgaguggaugaucaaggacggcugcgagguggacgugguggacaccggcagcggcuggaccccccugaugagagugagcgccgugagcggcaaccagagaguggccagccugcugaucgacgccggcgccaacgugaacgugaaggacagaaacggcaagaccccccugaugguggccgugcugaacaaccacgaggagcuggugcagcugcugcuggacaagggcgccgacgccagcgugaagaacgaguucggcaagggcgugcuggagauggccagaguguucgacagacagagcguggugagccugcuggaggagagaaagaagaagcagagacccaagaagagcugcgugugcuga

SEQ ID NO: 2698 - RNA, 3150 nt, Artificial Sequence
  BAF84259 variant
augggcagcagaacccccgagagcccccugcacgccgugcagcugagauggggccccagaagaagacccccccugcugccccugcugcugcugcugcugccccccccccccagagugggcggcuucaaccuggacgccgaggcccccgccgugcugagcggcccccccggcagcuucuucggcuucagcguggaguucuacagacccggcaccgacggcgugagcgugcuggugggcgcccccaaggccaacaccagccagcccggcgugcugcagggcggcgccguguaccugugccccuggggcgccagccccacccagugcacccccaucgaguucgacagcaagggcagcagacugcuggagagcagccugagcagcagcgagggcgaggagcccguggaguacaagagccugcagugguucggcgccaccgugagagcccacggcagcagcauccuggccugcgccccccuguacagcuggagaaccgagaaggagccccugagcgaccccgugggcaccugcuaccugagcaccgacaacuucaccagaauccuggaguacgcccccugcagaagcgacuucagcugggccgccggccagggcuacugccagggcggcuucagcgccgaguucaccaagaccggcagaguggugcugggcggccccggcagcuacuucuggcagggccagauccugagcgccacccaggagcagaucgccgagagcuacuaccccgaguaccugaucaaccuggugcagggccagcugcagaccagacaggccagcagcaucuacgacgacagcuaccugggcuacagcguggccgugggcgaguucagcggcgacgacaccgaggacuucguggccggcgugcccaagggcaaccugaccuacggcuacgugaccauccugaacggcagcgacaucagaagccuguacaacuucagcggcgagcagauggccagcuacuucgccuacgccguggccgccaccgacgugaacggcgacggccuggacgaccugcuggugggcgccccccugcugauggacagaacccccgacggcagaccccaggaggugggcagaguguacguguaccugcagcaccccgccggcaucgagagcacccccacccugacccugaccggccacgacgaguucggcagauucggcagcagccugaccccccugggcgaccuggaccaggacggcuacaacgacguggccaucggcgcccccuucggcggcgagacccagcagggcgugguguucguguuccccggcggccccggcggccugggcagcaagcccagccaggugcugcagccccugugggccgccagccacacccccgacuucuucggcagcgcccugagaggcggcagagaccuggacggcaacggcuaccccgaccugaucgugggcagcuucggcguggacaaggccgugguguacagaggcagacccaucgugagcgccagcgccagccugaccaucuuccccgccauguucaaccccgaggagagaagcugcagccuggagggcaaccccguggccugcaucaaccugagcuucugccugaacgccagcggcaagcacguggccgacagcaucggcuucaccguggagcugcagcuggacuggcagaagcagaagggcggcgugagaagagcccuguuccuggccagcagacaggccacccugacccagacccugcugauccagaacggcgccagagaggacugcagagagaugaagaucuaccugagaaacgagagcgaguucagagacaagcugagccccauccacaucgcccugaacuucagccuggacccccaggcccccguggacagccacggccugagacccgcccugcacuaccagagcaagagcagaaucgaggacaaggcccagauccugcugggcugcggcgaggacaacaucugcgugcccgaccugcagcuggagguguucggcgagcagaaccacguguaccugggcgacaagaacgcccugaaccugaccuuccacgcccagaacgugggcgagggcggcgccuacgaggccgagcugagagugaccgccccccccgaggccgaguacagcggccuggugagacaccccggcaacuucagcagccugagcugcgacuacuucgccgugaaccagagcagacugcuggugugcgaccugggcaaccccaugaaggccggcgccagccuguggggcggccugagauucaccgugccccaccugagagacaccaagaagaccauccaguucgacuuccagauccugagcaagaaccugaacaacagccagagcgacguggugagcuucagacugagcguggaggcccaggcccaggugacccugaacggcgugagcaagcccgaggccgugcuguuccccgugagcgacuggcaccccagagaccagccccaggaggaggaggaccugggccccgccgugcaccacguguacgagcugaucaaccagggccccagcagcaucagccagggcgugcuggagcugagcugcccccaggcccuggagggccagcagcugcuguacgugaccagagugaccggccugaacugcaccaccaaccaccccaucaaccccaagggccuggagcuggaccccgagggcagccugcaccaccagcagaagagagaggcccccagcagaagcagcgccagcagcggcccccagauccugaagugccccgaggccgagugcuucagacugagaugcgagcugggcccccugcaccagcaggagagccagagccugcagcugcacuucagagugugggccaagaccuuccugcagagagagcaccagcccuucagccugcagugcgaggccguguacaaggcccugaagaugcccuacagaauccugcccagacagcugccccagaaggagagacagguggccaccgccgugcaguggaccaaggccgagggcagcuacggcgugccccuguggaucaucauccuggccauccuguucggccugcugcugcugggccugcugaucuacauccuguacaagcugggcuucuucaagagaagccugcccuacggcaccgccauggagaaggcccagcugaagccccccgccaccagcgacgccuga

SEQ ID NO: 2699 - RNA, 3150 nt, Artificial Sequence
  BAG35324 variant
augggcagcagaacccccgagagcccccugcacgccgugcagcugagauggggccccagaagaagacccccccugcugccccugcugcugcugcugcugccccccccccccagagugggcggcuucaaccuggacgccgaggcccccgccgugcugagcggcccccccggcagcuucuucggcuucagcguggaguucuacagacccggcaccgacggcgugagcgugcuggugggcgcccccaaggccaacaccagccagcccggcgugcugcagggcggcgccguguaccugugccccuggggcgccagccccacccagugcacccccaucgaguucgacagcaagggcagcagacugcuggagagcagccugagcagcagcgagggcgaggagcccguggaguacaagagccugcagugguucggcgccaccgugagagcccacggcagcagcauccuggccugcgccccccuguacagcuggagaaccgagaaggagccccugagcgaccccgugggcaccugcuaccugagcaccgacaacuucaccagaauccuggaguacgcccccugcagaagcgacuucagcugggccgccggccagggcuacugccagggcggcuucagcgccgaguucaccaagaccggcagaguggugcugggcggccccggcagcuacuucuggcagggccagauccugagcgccacccaggagcagaucgccgagagcuacuaccccgaguaccugaucaaccuggugcagggccagcugcagaccagacaggccagcagcaucuacgacgacagcuaccugggcuacagcguggccgugggcgaguucagcggcgacgacaccgaggacuucguggccggcgugcccaagggcaaccugaccuacggcuacgugaccauccugaacggcagcgacaucagaagccuguacaacuucagcggcgagcagauggccagcuacuucggcuacgccguggccgccaccgacgugaacggcgacggccuggacgaccugcuggugggcgccccccugcugauggacagaacccccgacggcagaccccagggcgugggcagaguguacguguaccugcagcaccccgccggcaucgagcccacccccacccugacccugaccggccacgacgaguucggcagauucggcagcagccugaccccccugggcgaccuggaccaggacggcuacaacgacguggccaucggcgcccccuucggcggcgagacccagcagggcgugguguucguguuccccggcggccccggcggccugggcagcaagcugagccaggugcugcagccccugugggccgccagccacacccccgacuucuucggcagcgcccugagaggcggcagagaccuggacggcaacggcuaccccgaccugaucgugggcagcuucggcguggacaaggccgugguguacagaggcagacccaucgugagcgccagcgccagccugaccaucuuccccgccauguucaaccccgaggagagaagcugcagccuggagggcaaccccguggccugcaucaaccugagcuucugccugaacgccagcggcaagcacguggccgacagcaucggcuucaccguggagcugcagcuggacuggcagaagcagaagggcggcgugagaagagcccuguuccuggccagcagacaggccacccugacccagacccugcugauccagaacggcgccagagaggacugcagagagaugaagaucuaccugagaaacgagagcgaguucagagacaagcugagccccauccacaucgcccugaacuucagccuggacccccaggcccccguggacagccacggccugagacccgcccugcacuaccagagcaagagcagaaucgaggacaaggcccagauccugcuggacugcggcgaggacaacaucugcgugcccgaccugcagcuggagguguucggcgagcagaaccacguguaccugggcgacaagaacgcccugaaccugaccuuccacgcccagaacgugggcgagggcggcgccuacgaggccgagcugagagugaccgccccccccgaggccgaguacagcggccuggugagacaccccggcaacuucagcagccugagcugcgacuacuucgccgugaaccagagcagacugcuggugugcgaccugggcaaccccaugaaggccggcgccagccuguggggcggccugagauucaccgugccccaccugagagacaccaagaagaccauccaguucgacuuccagauccugagcaagaaccugaacaacagccagagcgacguggugagcuucagacugagcguggaggcccaggcccaggugacccugaacggcgugagcaagcccgaggccgugcuguuccccgugagcgacuggcaccccagagaccagccccagaaggaggaggaccugggccccgccgugcaccacguguacgagcugaucaaccagggccccagcagcaucagccagggcgugcuggagcugagcugcccccaggcccuggagggccagcagcugcuguacgugaccagagugaccggccugaacugcaccaccaaccaccccaucaaccccaagggccuggagcuggaccccgagggcagccugcaccaccagcagaagagagaggcccccagcagaagcagcgccagcagcggcccccagauccugaagugccccgaggccgagugcuucagacugagaugcgagcugggcccccugcaccagcaggagagccagagccugcagcugcacuucagagugugggccaagaccuuccugcagagagagcaccagcccuucagccugcagugcgaggccguguacaaggcccugaagaugcccuacagaauccugcccagacagcugccccagaaggagagacagguggccaccgccgugcaguggaccaaggccgagggcagcuacggcgugccccuguggaucaucauccuggccauccuguucggccugcugcugcugggccugcugaucuacauccuguacaagcugggcuucuucaagagaagccugcccuacggcaccgccauggagaaggcccagcugaagccccccgccaccagcgacgccuga

SEQ ID NO: 2700 - RNA, 1401 nt, Artificial Sequence
  BAG54537 variant
augcugagccugagacagagaaugaugcacgccagauucagaaacccccugagcagacagcccgccagacccagcuacagacagggcuacaacggcagacccaacguggagggcaaggugcugcccggcagcaacggcaagcccaacggccagagaaucaucaacggcccccagggcaccaagugggugguggaccuggacagaggccuggugcugaacgccgagggcagauaccugcaggacagccacggcaacccccugagaaucaagcugggcggcgacggcagaaccaucguggaccuggagggcacccccguggugagccccgacggccugccccuguucggccagggcagacacggcaccccccuggccaacgcccaggacaagcccauccugagccugggcggcaagccccuggugggccuggaggugaucaagaagaccacccacccccccaccaccaccaugcagcccaccaccaccaccaccccccugcccaccaccaccacccccagacccaccaccgccaccaccagaagaaccaccaccagaagacccaccaccaccgugagaaccaccaccagaaccaccaccaccaccacccccaagcccaccacccccauccccaccugcccccccggcacccuggagagacacgacgacgacggcaaccugaucaugagcagcaacggcauccccgagugcuacgccgaggaggacgaguucagcggccuggagaccgacaccgccgugcccaccgaggaggccuacgugaucuacgacgaggacuacgaguucgagaccagcagaccccccaccaccaccgagcccagcaccaccgccaccacccccagagugauccccgaggagggcgccaucagcagcuuccccgaggaggaguucgaccuggccggcagaaagagauucguggcccccuacgugaccuaccugaacaaggaccccagcgcccccugcagccugaccgacgcccuggaccacuuccagguggacagccuggacgagaucauccccaacgaccugaagaagagcgaccugcccccccagcacgcccccagaaacaucaccgugguggccguggagggcugccacagcuucgugaucguggacugggacaaggccacccccggcgacguggugaccggcuaccugguguacagcgccagcuacgaggacuucaucagaaacaaguggagcacccaggccagcagcgugacccaccugcccaucgagaaccugaagcccaacaccagauacuacuucaaggugcaggcccagaacccccacggcuacggccccaucagccccagcgugagcuucgugaccgagagcgacaacccccugcugguggugagaccccccggcggcgagcccaucuga

SEQ ID NO: 2701 - RNA, 471 nt, Artificial Sequence
  BAG58437 variant
auggaggagcagagaaacgaggagauccagagcuucaucuacagccugaagcagaugcugcugaacguggaggccaacagcgccaaggugcaggaggaccuggaggccgaguuccagagccuguucagccugcuggaggagcugaaggagggcaugcugaugaagaucaagcaggacagagccagcagaaccuacgagcugcagaaccagcuggccgccugcaccagagcccuggagagcagcgaggagcugcuggagaccgccaaccagacccugcaggccauggacagcgaggacuucccccaggccgccaagcagaucaaggacggcgugaccauggcccccgccuucagacugagccugaaggccaaggugagcgacaacaugagccaccugaugguggacuucgcccaggagagacagaugcugcaggcccugaaguuccugcccggcgagagaggcacccacuga

SEQ ID NO: 2702 - RNA, 921 nt, Artificial Sequence
  BAH14721 variant
augaucuucgaggagcacggcuucagaagaaccaccccccccaccaccgccacccccaucagacacagacccagacccuacccccccaacgugggccaggaggcccugagccagaccaccaucagcugggcccccuuccaggacaccagcgaguacaucaucagcugccaccccgugggcaccgacgaggagccccugcaguucagagugcccggcaccagcaccagcgccacccugaccggccugaccagaggcgccaccuacaacaucaucguggaggcccugaaggaccagcagagacacaaggugagagaggagguggugaccgugggcaacagcgugaacgagggccugaaccagcccaccgacgacagcugcuucgaccccuacaccgugagccacuacgccgugggcgacgagugggagagaaugagcgagagcggcuucaagcugcugugccagugccugggcuucggcagcggccacuucagaugcgacagcagcagauggugccacgacaacggcgugaacuacaagaucggcgagaagugggacagacagggcgagaacggccagaugaugagcugcaccugccugggcaacggcaagggcgaguucaagugcgacccccacgaggccaccugcuacgacgacggcaagaccuaccacgugggcgagcaguggcagaaggaguaccugggcgccaucugcagcugcaccugcuucggcggccagagaggcuggagaugcgacaacugcagaagacccggcggcgagcccagccccgagggcaccaccggccagagcuacaaccaguacagccagagauaccaccagagaaccaacaccaacgugaacugccccaucgagugcuucaugccccuggacgugcaggccgacagagaggacagcagagaguga

SEQ ID NO: 2703 - RNA, 1920 nt, Artificial Sequence
  BAG61560 variant
auggagaagauccuguucuaccuguuccugaucggcaucgccgugaaggcccagaucugccccaagagaugcgugugccagauccugagccccaaccuggccacccugugcgccaagaagggccugcuguucgugccccccaacaucgacagaagaaccguggagcugagacuggccgacaacuucgugaccaacaucaagagaaaggacuucgccaacaugaccagccugguggaccugacccugagcagaaacaccaucagcuucaucaccccccacgccuucgccgaccugagaaaccugagaagccugcaccugaacagcaacagacugaccaagaucaccaacgacauguucagcggccugagcaaccugcaccaccugauccugaacaacaaccagcugacccugaucagcagcaccgccuucgacgacguguucgcccuggaggagcuggaccugagcuacaacaaccuggagaccauccccugggacgccguggagaagauggugagccugcacacccugagccuggaccacaacaugaucgacaacauccccaagggcaccuucagccaccugcacaagaugaccagacuggacgugaccagcaacaagcugcagaagcugccccccgacccccuguuccagagagcccaggugcuggccaccagcggcaucaucagccccagcaccuucgcccugagcuucggcggcaacccccugcacugcaacugcgagcugcuguggcugagaagacugagcagagaguacgaccuggagaccugcgccagccccccccugcugaccggcagauacuucuggagcauccccgaggaggaguuccugugcgagcccccccugaucaccagacacacccacgagaugagagugcuggagggccagagagccacccugagaugcaaggccagaggcgaccccgagcccgccauccacuggaucagccccgagggcaagcugaucagcaacgccaccagaagccugguguacgacaacggcacccuggacauccugaucaccaccgugaaggacaccggcgccuucaccugcaucgccagcaaccccgccggcgaggccacccagaucguggaccugcacaucaucaagcugccccaccugcugaacagcaccaaccacauccacgagcccgaccccggcagcagcgacaucagcaccagcaccaagagcggcagcaacaccagcagcagcaacgacggcaucaccagccugaccgccaccagaguggugggcugcauccaguucaccaccgagcaggacuacgugagaugccacuucaugcagagccaguuccugggcggcaccaugaucaucaucaucggcggcaucaucguggccagcgugcugguguucaucaucauccugaugaucagauacaaggugugcaacaacaacggccagcacaaggugaccaaggugagcaacguguacagccagaccaacggcgcccagauccagggcugcagcgugacccugccccagagcgugagcaagcaggccgugggccacgaggagaacgcccagugcugcaaggccaccagcgacaacgugauccagagcagcgagaccugcagcagccaggacagcgccaccaccaccagcgcccugccccccagcuggaccagcagcaccagcgugagccagaagcagaagagaaagaccggcaccaagcccagcaccgagccccagaacgaggccgugaccaacguggagagccagaacaccaacagaaacaacagcaccgcccugcagcuggccagcagaccccccgacagcgugaccgagggccccaccagcaagagagcccacaucaagcccaacgcccugcugaccaacguggaccagaucgugcaggagacccagagacuggagcugaucuga

SEQ ID NO: 2704 - RNA, 1014 nt, Artificial Sequence
  BAG61984 variant
augaucuucgaggagcacggcuucagaagaaccaccccccccaccaccgccacccccaucagacacagacccagacccuacccccccaacgugggcgaggagauccagaucggccacauccccagagaggacguggacuaccaccuguacccccacggccccggccugaaccccaacgccagcaccggccaggaggcccugagccagaccaccaucagcugggcccccuuccaggacaccagcgaguacaucaucagcugccaccccgugggcaccgacgaggagccccugcaguucagagugcccggcaccagcaccagcgccacccugaccggccugaccagaggcgccaccuacaacaucaucguggaggcccugaaggaccagcagagacacaaggugagagaggagguggugaccgugggcaacagcgugaacgagggccugaaccagcccaccgacgacagcugcuucgaccccuacaccgugagccacuacgccgugggcgacgagugggagagaaugagcgagagcggcuucaagcugcugugccagugccugggcuucggcagcggccacuucagaugcgacagcagcagauggugccacgacaacggcgugaacuacaagaucggcgagaagugggacagacagggcgagaacggccagaugaugagcugcaccugccugggcaacggcaagggcgaguucaagugcgacccccacgaggccaccugcuacgacgacggcaagaccuaccacgugggcgagcaguggcagaaggaguaccugggcgccaucugcagcugcaccugcuucggcggccagagaggcuggagaugcgacaacugcagaagacccggcggcgagcccagccccgagggcaccaccggccagagcuacaaccaguacagccagagauaccaccagagaaccaacaccaacgugaacugccccaucgagugcuucaugccccuggacgugcaggccgacagagaggacagcagagaguga

SEQ ID NO: 2705 - RNA, 3045 nt, Artificial Sequence
  BAG62013 variant
augagagugaccugggcccccccccccagcaucgaccugaccaacuuccuggugagauacagccccgugaagaacgaggaggacguggccgagcugagcaucagccccagcgacaacgccguggugcugaccaaccugcugcccggcaccgaguacguggugagcgugagcagcguguacgagcagcacgagagcaccccccugagaggcagacagaagaccggccuggacagccccaccggcaucgacuucagcgacaucaccggcaacagcuucaccgugcacuggaucgcccccagagccaccaucaccggcuacagaaucagacaccaccccgagcacuucagcggcagacccagagaggacagagugccccacagcagaaacagcaucacccugaccaaccugacccccggcaccgaguacguggugagcaucguggcccugaacggcagagaggagagcccccugcugaucggccagcagagcaccgugagcgacgugcccagagaccuggaggugguggccgccacccccaccagccugcugaucagcugggacgcccccgccgugaccgugagauacuacagaaucaccuacggcgagaccggcggcaacagccccgugcaggaguucaccgugcccggcagcaagagcaccgccaccaucagcggccugaagcccggcguggacuacaccaucaccguguacgccgugaccggcagaggcgacagccccgccagcagcaagcccaucagcaucaacuacagaaccgagaucgacaagcccagccagaugcaggugaccgacgugcaggacaacagcaucagcgugaaguggcugcccagcagcagccccgugaccggcuacagagugaccaccacccccaagaacggccccggccccaccaagaccaagaccgccggccccgaccagaccgagaugaccaucgagggccugcagcccaccguggaguacguggugagcguguacgcccagaaccccagcggcgagagccagccccuggugcagaccgccgugaccaccauccccgcccccaccgaccugaaguucacccaggugacccccaccagccugagcgcccaguggaccccccccaacgugcagcugaccggcuacagagugagagugacccccaaggagaagaccggccccaugaaggagaucaaccuggcccccgacagcagcagcgugguggugagcggccugaugguggccaccaaguacgaggugagcguguacgcccugaaggacacccugaccagcagacccgcccagggcguggugaccacccuggagaacgugagcccccccagaagagccagagugaccgacgccaccgagaccaccaucaccaucagcuggagaaccaagaccgagaccaucaccggcuuccagguggacgccgugcccgccaacggccagacccccauccagagaaccaucaagcccgacgugagaagcuacaccaucaccggccugcagcccggcaccgacuacaagaucuaccuguacacccugaacgacaacgccagaagcagccccguggugaucgacgccagcaccgccaucgacgcccccagcaaccugagauuccuggccaccacccccaacagccugcuggugagcuggcagccccccagagccagaaucaccggcuacaucaucaaguacgagaagcccggcagcccccccagagagguggugcccagacccagacccggcgugaccgaggccaccaucaccggccuggagcccggcaccgaguacaccaucuacgugaucgcccugaagaacaaccagaagagcgagccccugaucggcagaaagaagaccgacgagcugccccagcuggugacccugccccaccccaaccugcacggccccgagauccuggacgugcccagcaccgugcagaagacccccuucgugacccaccccggcuacgacaccggcaacggcauccagcugcccggcaccagcggccagcagcccagcgugggccagcagaugaucuucgaggagcacggcuucagaagaaccaccccccccaccaccgccacccccaucagacacagacccagacccuacccccccaacgugggcgaggagauccagaucggccacauccccagagaggacguggacuaccaccuguacccccacggccccggccugaaccccaacgccagcaccggccaggaggcccugagccagaccaccaucagcugggcccccuuccaggacaccagcgaguacaucaucagcugccaccccgugggcaccgacgaggagccccugcaguucagagugcccggcaccagcaccagcgccacccugaccggccugaccagaggcgccaccuacaacaucaucguggaggcccugaaggaccagcagagacacaaggugagagaggagguggugaccgugggcaacagcgugaacgagggccugaaccagcccaccgacgacagcugcuucgaccccuacaccgugagccacuacgccgugggcgacgagugggagagaaugagcgagagcggcuucaagcugcugugccagugccugggcuucggcagcggccacuucagaugcgacagcagcagauggugccacgacaacggcgugaacuacaagaucggcgagaagugggacagacagggcgagaacggccagaugaugagcugcaccugccugggcaacggcaagggcgaguucaagugcgacccccacgaggccaccugcuacgacgacggcaagaccuaccacgugggcgagcaguggcagaaggaguaccugggcgccaucugcagcugcaccugcuucggcggccagagaggcuggagaugcgacaacugcagaagacccggcggcgagcccagccccgagggcaccaccggccagagcuacaaccaguacagccagagauaccaccagagaaccaacaccaacgugaacugccccaucgagugcuucaugccccuggacgugcaggccgacagagaggacagcagagaguga

SEQ ID NO: 2706 - RNA, 2685 nt, Artificial Sequence
  BAG62178 variant
augagagugaccugggcccccccccccagcaucgaccugaccaacuuccuggugagauacagccccgugaagaacgaggaggacguggccgagcugagcaucagccccagcgacaacgccguggugcugaccaaccugcugcccggcaccgaguacguggugagcgugagcagcguguacgagcagcacgagagcaccccccugagaggcagacagaagaccggccuggacagccccaccggcaucgacuucagcgacaucaccgccaacagcuucaccgugcacuggaucgcccccagagccaccaucaccggcuacagaaucagacaccaccccgagcacuucagcggcagacccagagaggacagagugccccacagcagaaacagcaucacccugaccaaccugacccccggcaccgaguacguggugagcaucguggcccugaacggcagagaggagagcccccugcugaucggccagcagagcaccgugagcgacgugcccagagaccuggaggugguggccgccacccccaccagccugcugaucagcugggacgcccccgccgugaccgugagauacuacagaaucaccuacggcgagaccggcggcaacagccccgugcaggaguucaccgugcccggcagcaagagcaccgccaccaucagcggccugaagcccggcguggacuacaccaucaccguguacgccgugaccggcagaggcgacagccccgccagcagcaagcccaucagcaucaacuacagaaccgagaucgacaagcccagccagaugcaggugaccgacgugcaggacaacagcaucagcgugaaguggcugcccagcagcagccccgugaccggcuacagagugaccaccacccccaagaacggccccggccccaccaagaccaagaccgccggccccgaccagaccgagaugaccaucgagggccugcaccccaccguggaguacguggugagcguguacgcccagaaccccagcggcgagagccagccccuggugcagaccgccgugaccaccauccccgcccccaccgaccugaaguucacccaggugacccccaccagccugagcgcccaguggaccccccccaacgugcagcugaccggcuacagagugagagugacccccaaggagaagaccggccccaugaaggagaucaaccuggcccccgacagcagcagcgugguggugagcggccugaugguggccaccaaguacgaggugagcguguacgcccugaaggacacccugaccagcagacccgcccagggcguggugaccacccuggagaacgugagcccccccagaagagccagagugaccgacgccaccgagaccaccaucaccaucagcuggagaaccaagaccgagaccaucaccggcuuccagguggacgccgugcccgccaacggccagacccccauccagagaaccaucaagcccgacgugagaagcuacaccaucaccggccugcagcccggcaccgacuacaagaucuaccuguacacccugaacgacaacgccagaagcagccccguggugaucgacgccagcaccgccaucgacgcccccagcaaccugagauuccuggccaccacccccaacagccugcuggugagcuggcagccccccagagccagaaucaccggcuacaucaucaaguacgagaagcccggcagcccccccagagagguggugcccagacccagacccggcgugaccgaggccaccaucaccggccuggagcccggcaccgaguacaccaucuacgugaucgcccugaagaacaaccagaagagcgagccccugaucggcagaaagaagaccggccaggaggcccugagccagaccaccaucagcugggcccccuuccaggacaccagcgaguacaucaucagcugccaccccgugggcaccgacgaggagccccugcaguucagagugcccggcaccagcaccagcgccacccugaccggccugaccagaggcgccaccuacaacaucaucguggaggcccugaaggaccagcagagacacaaggugagagaggaggugaucaccgugggcaacagcgugaacgagggccugaaccagcccaccgacgacagcugcuucgaccccuacaccgugagccacuacgccgugggcgacgagugggagagaaugagcgagagcggcuucaagcugcugugccagugccugggcuucggcagcggccacuucagaugcgacagcagcagauggugccacgacaacggcgugaacuacaagaucggcgagaagugggacagacagggcgagaacggccagaugaugagcugcaccugccugggcaacggcaagggcgaguucaagugcgacccccacgaggccaccugcuacgacgacggcaagaccuaccacgugggcgagcaguggcagaaggaguaccugggcgccaucugcagcugcaccugcuucggcggccagagaggcuggagaugcgacaacugcagaagacccggcggcgagcccagccccgagggcaccaccggccagagcuacaaccaguacagccagagauaccaccagagaaccaacaccaacgugaacugccccaucgagugcuucaugccccuggacgugcaggccgacagagaggacagcagagaguga

SEQ ID NO: 2707 - RNA, 1152 nt, Artificial Sequence
  BAH12351 variant
auggccagcgccuucagacugagccugaagcccaaggugagcgacaacaugacccaccugaugguggacuucagccaggagagacagaugcugcagacccugaaguuccugcccgugcccaaggcccccgagaucgaccccguggagugccugguggccgacaacagcgugaccguggccuggagaaugcccgaggaggacaacaagaucgaccacuucauccuggagcacagaaagaccaacuucgacggccugcccagagugaaggacgagagaugcugggagaucaucgacaacaucaagggcaccgaguacacccugagcggccugaaguucgacagcaaguacaugaacuucagagugagagccugcaacaaggccguggccggcgaguacagcgaccccgugacccuggagaccaaggcccugaacuucaaccuggacaacagcagcagccaccugaaccugaagguggaggacaccugcguggagugggaccccaccggcggcaagggccaggagagcaagaucaagggcaaggagaacaagggcagcgugcacgugaccagccugaagaagcacaccagcggcacccccagccccaagagaaccagcgugggcagcagaccccccgccgugagaggcagcagagacagauucaccggcgagagcuacaccgugcugggcgacaccgccaucgagagcggccagcacuacugggaggugaaggcccagaaggacugcaagagcuacagcgugggcguggccuacaagacccugggcaaguucgaccagcugggcaagaccaacaccagcuggugcauccacgugaacaacuggcugcagaacaccuucgccgccaagcacaacaacaaggugaaggcccuggacgugaccgugcccgagaagaucggcguguucugcgacuucgacggcggccagcugagcuucuacgacgccaacagcaagcagcugcuguacagcuucaagaccaaguucacccagcccgugcugcccggcuucaugguguggugcggcggccugagccugagcaccggcaugcaggugcccagcgccgugagaacccugcagaagagcgagaacggcaugaccggcagcgccagcagccugaacaacguggugacccaguga

SEQ ID NO: 2708 - RNA, 441 nt, Artificial Sequence
  BAH14175 variant
augccccccagcaagccccacccccccguggugggcaaggugacccaccacagcaucgagcuguacugggaccuggagaagaaggccaagagacagggcccccaggagcagugguucagauucagcaucgaggaggaggaccccaagaugcacaccuacggcaucaucuacaccggcuacgccaccaagcacgugguggagggccuggagcccagaacccuguacagauucagacugaaggugaccagccccagcggcgagugcgaguacagcccccuggugagcgugagcaccaccagcgaguacagcgacagaccccacagcccccugagcagaagcauggagaugaccagcaaccuggagaagaucuucugccugagcuucggccugaccagaagcagaaacgacaccaucuucaagcacugcaacaacaucugcuga

SEQ ID NO: 2709 - RNA, 2055 nt, Artificial Sequence
  EAX08810 variant
auggccgagcaccccccccugcuggacaccacccagauccugagcagcgacaucagccugcugagcgcccccaucgugagcgccgacggcacccagcaggugauccuggugcaggugaaccccggcgaggccuucaccaucagaagagaggacggccaguuccagugcaucaccggccccgcccaggugcccaugaugagccccaacggcagcgugccccccaucuacgugccccccggcuacgccccccaggugaucgaggacaacggcgugagaagaguggugguggugccccaggcccccgaguuccaccccggcagccacaccgugcugcacagaagcccccaccccccccugcccggcuucauccccgugcccaccaugaugccccccccccccagacacauguacagccccgugaccggcgccggcgacaugaccacccaguacaugccccaguaccagagcagccagguguacggcgacguggacgcccacagcacccacggcagaagcaacuucagagacgagagaagcagcaagaccuacgagagacugcagaagaagcugaaggacagacagggcacccagaaggacaagaugagcagcccccccagcagcccccagaagugccccagccccaucaacgagcacaacggccugaucaagggccagaucgccggcggcaucaacaccggcagcgccaagaucaagagcggcaagggcaagggcggcacccagguggacaccgagaucgaggagaaggacgaggagaccaaggccuucgaggcccugcugagcaacaucgugaagcccguggccagcgacauccaggccagaaccguggugcugaccuggagcccccccagcagccugaucaacggcgagaccgacgagagcagcgugcccgagcuguacggcuacgaggugcugaucagcagcaccggcaaggacggcaaguacaagagcguguacgugggcgaggagaccaacaucacccugaacgaccugaagcccgccauggacuaccacgccaaggugcaggccgaguacaacagcaucaagggcacccccagcgaggccgagaucuucaccacccugagcugcgagcccgacauccccaacccccccagaaucgccaacagaaccaagaacagccugacccugcaguggaaggcccccagcgacaacggcagcaagauccagaacuucgugcuggagugggacgagggcaagggcaacggcgaguucugccagugcuacaugggcagccagaagcaguucaagaucaccaagcugagccccgccaugggcugcaaguucagacugagcgccagaaacgacuacggcaccagcggcuucagcgaggaggugcuguacuacaccagcggcugcgcccccagcaugcccgccagccccgugcugaccaaggccggcaucaccuggcugagccugcaguggagcaagcccagcggcacccccagcgacgagggcaucagcuacauccuggagauggaggaggagaccagcggcuacggcuucaagcccaaguacgacggcgaggaccuggccuacaccgugaagaaccugagaagaagcaccaaguacaaguucaaggugaucgccuacaacagcgagggcaagagcaaccccagcgaggugguggaguucaccaccugccccgacaagcccggcauccccgugaagcccagcgugaagggcaagauccacagccacagcuucaagaucaccugggacccccccaaggacaacggcggcgccaccaucaacaaguacgugguggagauggccgagggcagcaacggcaacaagugggagaugaucuacagcggcgccaccagagagcaccugugcgacagacugaaccccggcugcuucuacagacugagaguguacugcaucagcgacggcggccagagcgccgugagcgagagccugcuggugcagacccccgccgugccccccggccccugccugccccccagacugcagggcagacccaaggccaaggagauccagacccccagcggcuga

SEQ ID NO: 2710 - RNA, 492 nt, Artificial Sequence
  AAG35520 variant
augagcgagagcggcuucaagcugcugugccagugccugggcuucggcagcggccacuucagaugcgacagcagcagauggugccacgacaacggcgugaacuacaagaucggcgagaagugggacagacagggcgagaacggccagaugaugagcugcaccugccugggcaacggcaagggcgaguucaagugcgacccccacgaggccaccugcuacgacgacggcaagaccuaccacgugggcgagcaguggcagaaggaguaccugggcgccaucugcagcugcaccugcuucggcggccagagaggcuggagaugcgacaacugcagaagacccggcggcgagcccagccccgagggcaccaccggccagagcuacaaccaguacagccagagauaccaccagagaaccaacaccaacgugaacugccccaucgagugcuucaugccccuggacgugcaggccgacagagaggacagcagagaguga

SEQ ID NO: 2711 - RNA, 1143 nt, Artificial Sequence
  AAA52471 variant
augauguucagcggcuucaacgccgacuacgaggccagcagcagcagaugcagcagcgccagccccgccggcgacagccugagcuacuaccacagccccgccgacagcuucagcagcaugggcagccccgugaacgcccaggacuucugcaccgaccuggccgugagcagcgccaacuucauccccaccgugaccgccaucagcaccagccccgaccugcaguggcuggugcagcccgcccuggugagcagcguggcccccagccagaccagagccccccaccccuucggcgugcccgcccccagcgccggcgccuacagcagagccggcguggugaagaccaugaccggcggcagagcccagagcaucggcagaagaggcaagguggagcagcugagccccgaggaggaggagaagagaagaaucagaagagagagaaacaagauggccgccgccaagugcagaaacagaagaagagagcugaccgacacccugcaggccgagaccgaccagcuggaggacgagaagagcgcccugcagaccgagaucgccaaccugcugaaggagaaggagaagcuggaguucauccuggccgcccacagacccgccugcaagauccccgacgaccugggcuuccccgaggagaugagcguggccagccuggaccugaccggcggccugcccgagguggccacccccgagagcgaggaggccuucacccugccccugcugaacgaccccgagcccaagcccagcguggagcccgugaagagcaucagcagcauggagcugaagaccgagcccuucgacgacuuccuguuccccgccagcagcagacccagcggcagcgagaccgccagaagcgugcccgacauggaccugagcggcagcuucuacgccgccgacugggagccccugcacagcggcagccugggcaugggccccauggccaccgagcuggagccccugugcacccccguggugaccugcacccccagcugcaccgccuacaccagcagcuucguguucaccuaccccgaggccgacagcuuccccagcugcgccgccgcccacagaaagggcagcagcagcaacgagcccagcagcgacagccugagcagccccacccugcuggcccuguga

SEQ ID NO: 2712 - RNA, 1296 nt, Artificial Sequence
  AAG53607 variant
augcccaaccccagacccggcaagcccagcgcccccagccuggcccugggccccagccccggcgccagccccagcuggagagccgcccccaaggccagcgaccugcugggcgccagaggccccggcggcaccuuccagggcagagaccugagaggcggcgcccacgccagcagcagcagccugaaccccaugccccccagccagcugcagcugcccacccugccccuggugaugguggcccccagcggcgccagacugggcccccugccccaccugcaggcccugcugcaggacagaccccacuucaugcaccagcugagcaccguggacgcccacgccagaacccccgugcugcaggugcacccccuggagagccccgccaugaucagccugaccccccccaccaccgccaccggcguguucagccugaaggccagacccggccugccccccggcaucaacguggccagccuggagugggugagcagagagcccgcccugcugugcaccuuccccaaccccagcgcccccagaaaggacagcacccugagcgccgugccccagagcagcuacccccugcuggccaacggcgugugcaaguggcccggcugcgagaagguguucgaggagcccgaggacuuccugaagcacugccaggccgaccaccugcuggacgagaagggcagagcccagugccugcugcagagagagauggugcagagccuggagcagcagcuggugcuggagaaggagaagcugagcgccaugcaggcccaccuggccggcaagauggcccugaccaaggccagcagcguggccagcagcgacaagggcagcugcugcaucguggccgccggcagccagggccccguggugcccgccuggagcggccccagagaggcccccgacagccuguucgccgugagaagacaccuguggggcagccacggcaacagcaccuuccccgaguuccugcacaacauggacuacuucaaguuccacaacaugagaccccccuucaccuacgccacccugaucagaugggccauccuggaggcccccgagaagcagagaacccugaacgagaucuaccacugguucaccagaauguucgccuucuucagaaaccaccccgccaccuggaagaacgccaucagacacaaccugagccugcacaagugcuucgugagaguggagagcgagaagggcgccguguggaccguggacgagcuggaguucagaaagaagagaagccagagacccagcagaugcagcaaccccacccccggccccuga

SEQ ID NO: 2713 - RNA, 1098 nt, Artificial Sequence
  AAA52639 variant
auguggcugagaagccacagacagcugugccuggccuuccugcuggugugcgugcugagcgugaucuucuuccugcacauccaccaggacagcuucccccacggccugggccugagcauccugugccccgacagaagacuggugaccccccccguggccaucuucugccugcccggcaccgccaugggccccaacgccagcagcagcugcccccagcaccccgccagccugagcggcaccuggaccguguaccccaacggcagauucggcaaccagaugggccaguacgccacccugcuggcccuggcccagcugaacggcagaagagccuucauccugcccgccaugcacgccgcccuggcccccguguucagaaucacccugcccgugcuggcccccgagguggacagcagaacccccuggagagagcugcagcugcacgacuggaugagcgaggaguacgccgaccugagagaccccuuccugaagcugagcggcuuccccugcagcuggaccuucuuccaccaccugagagagcagaucagaagagaguucacccugcacgaccaccugagagaggaggcccagagcgugcugggccagcugagacugggcagaaccggcgacagacccagaaccuucgugggcgugcacgugagaagaggcgacuaccugcaggugaugccccagagauggaagggcguggugggcgacagcgccuaccugagacaggccauggacugguucagagccagacacgaggcccccguguucguggugaccagcaacggcauggaguggugcaaggagaacaucgacaccagccagggcgacgugaccuucgccggcgacggccaggaggccacccccuggaaggacuucgcccugcugacccagugcaaccacaccaucaugaccaucggcaccuucggcuucugggccgccuaccuggccggcggcgacaccguguaccuggccaacuucacccugcccgacagcgaguuccugaagaucuucaagcccgaggccgccuuccugcccgagugggugggcaucaacgccgaccugagcccccuguggacccuggccaagcccuga

SEQ ID NO: 2714 - RNA, 1380 nt, Artificial Sequence
  EAW58359 variant
auggccccccugugccccagccccuggcugccccugcugauccccgcccccgcccccggccugaccgugcagcugcugcugagccugcugcugcuggugcccgugcacccccagagacugcccagaaugcaggaggacagcccccugggcggcggcagcagcggcgaggacgacccccugggcgaggaggaccugcccagcgaggaggacagccccagagaggaggacccccccggcgaggaggaccugcccggcgaggaggaccugcccggcgaggaggaccugcccgaggugaagcccaagagcgaggaggagggcagccugaagcuggaggaccugcccaccguggaggcccccggcgacccccaggagccccagaacaacgcccacagagacaaggagggcgacgaccagagccacuggagauacggcggcgacccccccuggcccagagugagccccgccugcgccggcagauuccagagccccguggacaucagaccccagcuggccgccuucugccccgcccugagaccccuggagcugcugggcuuccagcugcccccccugcccgagcugagacugagaaacaacggccacagcgugcagcugacccugccccccggccuggagauggcccugggccccggcagagaguacagagcccugcagcugcaccugcacuggggcgccgccggcagacccggcagcgagcacaccguggagggccacagauuccccgccgagauccacguggugcaccugagcaccgccuucgccagaguggacgaggcccugggcagacccggcggccuggccgugcuggccgccuuccuggaggagggccccgaggagaacagcgccuacgagcagcugcugagcagacuggaggagaucgccgaggagggcagcgagacccaggugcccggccuggacaucagcgcccugcugcccagcgacuucagcagauacuuccaguacgagggcagccugaccaccccccccugcgcccagggcgugaucuggaccguguucaaccagaccgugaugcugagcgccaagcagcugcacacccugagcgacacccuguggggccccggcgacagcagacugcagcugaacuucagagccacccagccccugaacggcagagugaucgaggccagcuuccccgccggcguggacagcagccccagagccgccgagcccgugcagcugaacagcugccuggccgccggcgacauccuggcccugguguucggccugcuguucgccgugaccagcguggccuuccuggugcagaugagaagacagcacagaagaggcaccaagggcggcgugagcuacagacccgccgagguggccgagaccggcgccuga

SEQ ID NO: 2715 - RNA, 417 nt, Artificial Sequence
  U19142.1 variant
augagcuggagaggcagaagcaccuacagacccagacccagaagauacguggagccccccgagaugaucggccccaugagacccgagcaguucagcgacgagguggagcccgccacccccgaggagggcgagcccgccacccagagacaggaccccgccgccgcccaggagggcgaggacgagggcgccagcgccggccagggccccaagcccgaggccgacagccaggagcagggccacccccagaccggcugcgagugcgaggacggccccgacggccaggagauggacccccccaaccccgaggaggugaagacccccgaggaggagaugagaagccacuacguggcccagaccggcauccuguggcugcugaugaacaacugcuuccugaaccugagccccagaaagcccuga

SEQ ID NO: 2716 - RNA, 351 nt, Artificial Sequence
  AAH69397 variant
augagcuggagaggcagaagcaccuacagacccagacccagaagauacguggagccccccgagaugaucggccccaugagacccgagcaguucagcgacgagguggagcccgccacccccgaggagggcgagcccgccacccagagacaggaccccgccgccgcccaggagggccaggacgagggcgccagcgccggccagggccccaagcccgaggcccacagccaggagcagggccacccccagaccggcugcgagugcgaggacggccccgacggccaggagauggacccccccaaccccgaggaggugaagacccccgaggagggcgagaagcagagccagugcuga

SEQ ID NO: 2717 - RNA, 357 nt, Artificial Sequence
  AAA82746 variant
augaaccugagcagaggcaagagcaccuacuacuggcccagacccagaagauacgugcagccccccgaggugaucggccccaugagacccgagcaguucagcgacgagguggagcccgccacccccgaggagggcgagcccgccacccagagacaggaccccgccgccgcccaggagggcgaggacgagggcgccagcgccggccagggccccaagcccgaggccgacagccaggagcagggccacccccagaccggcugcgagugcgaggacggccccgacggccaggagauggacccccccaaccccgaggaggugaagacccccgaggagggcgagaagcagagccagugcuga

SEQ ID NO: 2718 - RNA, 354 nt, Artificial Sequence
  AAH69470 variant
augagcuggagaggcagaagcaccuacuacuggcccagacccagaagauacgugcagccccccgagaugaucggccccaugagacccgagcaguucagcgacgagguggagcccgccacccccgaggagggcgagcccgccacccagagacaggaccccgccgccgcccaggagggcgaggacgagggcgccagcgccggccagggccccaagcccgaggccgacagccaggagcagggccacccccagaccggcugcgagugcgaggacggccccgacggccaggagauggacccccccaaccccgaggaggugaagacccccgaggagggcgagggccagagccagugcuga

SEQ ID NO: 2719 - RNA, 354 nt, Artificial Sequence
  AAA82748 variant
augagcuggagaggcagaagcaccuacuacuggcccagacccagaagauacgugcagccccccgaggugaucggccccaugagacccgagcaguucagcgacgagguggagcccgccacccccgaggagggcgagcccgccacccagagacaggaccccgccgccgcccaggagggcgaggacgagggcgccagcgccggccagggccccaagcccgaggccgacagccaggagcagggccacccccagaccggcugcgagugcgaggacggccccgacggccaggagauggacccccccaaccccgaggaggugaagacccccgaggagggcgagaagcagagccagugcuga

SEQ ID NO: 2720 - RNA, 354 nt, Artificial Sequence
  AAA82749 variant
augagcuggagaggcagaagcaccuacuacuggcccagacccagaagauacgugcagccccccgaggugaucggccccaugagacccgagcaguucagcgacgagguggagcccgccacccccgaggagggcgagcccgccacccagagacaggaccccgccgccgcccaggagggcgaggacgagggcgccagcgccggccagggccccaagcccgaggccgacagccaggagcagggccacccccagaccggcugcgagugcgaggacggccccgacggccaggagguggacccccccaaccccgaggaggugaagacccccgaggagggcgagaagcagagccagugcuga

SEQ ID NO: 2721 - RNA, 354 nt, Artificial Sequence
  AAC25989 variant
augagcuggagaggcagaagcaccuacuacuggcccagacccagaagauacgugcagccccccgagaugaucggccccaugagacccgagcaguucagcgacgagguggagcccgccacccccgaggagggcgagcccgccacccagagacaggaccccgccgccgcccaggagggcgaggacgagggcgccagcgccggccagggccccaagcccgaggcccacagccaggagcagggccacccccagaccggcugcgagugcgaggacggccccgacggccaggagauggacccccccaaccccgaggaggugaagacccccgaggagggcgagaagcagagccagugcuga

SEQ ID NO: 2722 - RNA, 351 nt, Artificial Sequence
  AAC33676 variant
augagcuggagaggcagaagcaccuacagacccagacccagaagauacguggagccccccgagaugaucggccccaugagacccgagcaguucagcgacgagguggagcccgccacccccgaggagggcgagcccgccacccagagacaggaccccgccgccgcccaggagggcgaggacgagggcgccagcgccggccagggccccaagcccgaggccgacagccaggagcagggccacccccagaccggcugcgagugcgaggacggccccgacggccaggagauggacccccccaaccccgaggaggugaagacccccgaggagggcgagaagcagagccagugcuga

SEQ ID NO: 2723 - RNA, 1344 nt, Artificial Sequence
  AAA35657 variant
auggagcugcugaagcugaacagaagcgugcagggcaccggccccggccccggcgccagccugugcagacccggcgccccccugcugaacagcagcagcgugggcaaccugagcugcgagccccccagaaucagaggcgccggcaccagagagcuggagcuggccaucagaaucacccuguacgccgugaucuuccugaugagcgugggcggcaacaugcugaucaucguggugcugggccugagcagaagacugagaaccgugaccaacgccuuccugcugagccuggccgugagcgaccugcugcuggccguggccugcaugcccuucacccugcugcccaaccugaugggcaccuucaucuucggcaccgugaucugcaaggccgugagcuaccugaugggcgugagcgugagcgugagcacccugagccugguggccaucgcccuggagagauacagcgccaucugcagaccccugcaggccagaguguggcagaccagaagccacgccgccagagugaucguggccaccuggcugcugagcggccugcugauggugcccuaccccguguacaccguggugcagcccgugggccccagagugcugcagugcgugcacagauggcccagcgccagagugagacagaccuggagcgugcugcugcugcugcugcuguucuucauccccggcguggugauggccguggccuacggccugaucagcagagagcuguaccugggccugagauucgacggcgacagcgacagcgacagccagagcagagugagaaaccagggcggccugcccggcgccgugcaccagaacggcagaugcagacccgagaccggcgccgugggcgaggacagcgacggcugcuacgugcagcugcccagaagcagacccgcccuggagcugaccgcccugaccgcccccggccccggcagcggcagcagacccacccaggccaagcugcuggccaagaagagaguggugagaaugcugcuggugaucguggugcuguucuuccugugcuggcugcccguguacagcgccaacaccuggagagccuucgacggccccggcgcccacagagcccugagcggcgcccccaucagcuucauccaccugcugagcuacgccagcgccugcgugaacccccugguguacugcuucaugcacagaagauucagacaggccugccuggagaccugcgccagaugcugccccagaccccccagagccagacccagagcccugcccgacgaggacccccccacccccagcaucgccagccugagcagacugagcuacaccaccaucagcacccugggccccggcuga

SEQ ID NO: 2724 - RNA, 2226 nt, Artificial Sequence
  AAD22449 variant
auggcccuguucacccccuggaagcugagcagccagaagcugggcuucuuccuggugaccuucggcuucaucuggggcaugaugcugcugcacuucaccauccagcagagaacccagcccgagagcagcagcaugcugagagagcagauccuggaccugagcaagagauacaucaaggcccuggccgaggagaacagaaacgugguggacggccccuacgccggcgugaugaccgccuacgaccugaagaagacccuggccgugcugcuggacaacauccugcagagaaucggcaagcuggagagcaagguggacaaccugguggugaacggcaccggcaccaacagcaccaacagcaccaccgccgugcccagccugguggcccuggagaagaucaacguggccgacaucaucaacggcgcccaggagaagugcgugcugccccccauggacggcuacccccacugcgagggcaagaucaaguggaugaaggacauguggagaagcgaccccugcuacgccgacuacggcguggacggcagcaccugcagcuucuucaucuaccugagcgagguggagaacuggugcccccaccugcccuggagagccaagaaccccuacgaggaggccgaccacaacagccuggccgagaucagaaccgacuucaacauccuguacagcaugaugaagaagcacgaggaguucagauggaugagacugagaaucagaagaauggccgacgccuggauccaggccaucaagagccuggccgagaagcagaaccuggagaagagaaagagaaagaaggugcuggugcaccugggccugcugaccaaggagagcggcuucaagaucgccgagaccgccuucagcggcggcccccugggcgagcuggugcaguggagcgaccugaucaccagccuguaccugcugggccacgacaucagaaucagcgccagccuggccgagcugaaggagaucaugaagaagguggugggcaacagaagcggcugccccaccgugggcgacagaaucguggagcugaucuacaucgacaucgugggccuggcccaguucaagaagacccugggccccagcugggugcacuaccagugcaugcugagagugcuggacagcuucggcaccgagcccgaguucaaccacgccaacuacgcccagagcaagggccacaagacccccuggggcaaguggaaccugaacccccagcaguucuacaccauguucccccacacccccgacaacagcuuccugggcuucgugguggagcagcaccugaacagcagcgacauccaccacaucaacgagaucaagagacagaaccagagccugguguacggcaagguggacagcuucuggaagaacaagaagaucuaccuggacaucauccacaccuacauggaggugcacgccaccguguacggcagcagcaccaagaacauccccagcuacgugaagaaccacggcauccugagcggcagagaccugcaguuccugcugagagagaccaagcuguucgugggccugggcuuccccuacgagggccccgccccccuggaggccaucgccaacggcugcgccuuccugaaccccaaguucaacccccccaagagcagcaagaacaccgacuucuucaucggcaagcccacccugagagagcugaccagccagcaccccuacgccgagguguucaucggcagaccccacguguggaccguggaccugaacaaccaggaggagguggaggacgccgugaaggccauccugaaccagaagaucgagcccuacaugcccuacgaguucaccugcgagggcaugcugcagagaaucaacgccuucaucgagaagcaggacuucugccacggccaggugauguggcccccccugagcgcccugcaggugaagcuggccgagcccggccagagcugcaagcaggugugccaggagagccagcugaucugcgagcccagcuucuuccagcaccugaacaaggacaaggacaugcugaaguacaaggugaccugccagagcagcgagcuggccaaggacauccuggugcccagcuucgaccccaagaacaagcacugcguguuccagggcgaccugcugcuguucagcugcgccggcgcccaccccagacaccagagagugugccccugcagagacuucaucaagggccagguggcccugugcaaggacugccuguga

SEQ ID NO: 2725 - RNA, 1743 nt, Artificial Sequence
  EAX11770 variant
auggccggcaccgugagaaccgccugccuggugguggccaugcugcugagccuggacuuccccggccaggcccagccccccccccccccccccgacgccaccugccaccaggugagaagcuucuuccagagacugcagcccggccugaagugggugcccgagacccccgugcccggcagcgaccugcaggugugccugcccaagggccccaccugcugcagcagaaagauggaggagaaguaccagcugaccgccagacugaacauggagcagcugcugcagagcgccagcauggagcugaaguuccugaucauccagaacgccgccguguuccaggaggccuucgagaucguggugagacacgccaagaacuacaccaacgccauguucaagaacaacuaccccagccugaccccccaggccuucgaguucgugggcgaguucuucaccgacgugagccuguacauccugggcagcgacaucaacguggacgacauggugaacgagcuguucgacagccuguuccccgugaucuacacccagcugaugaaccccggccugcccgacagcgcccuggacaucaacgagugccugagaggcgccagaagagaccugaagguguucggcaacuuccccaagcugaucaugacccaggugagcaagagccugcaggugaccagaaucuuccugcaggcccugaaccugggcaucgaggugaucaacaccaccgaccaccugaaguucagcaaggacugcggcagaaugcugaccagaaugugguacugcagcuacugccagggccugaugauggugaagcccugcggcggcuacugcaacguggugaugcagggcugcauggccggcgugguggagaucgacaaguacuggagagaguacauccugagccuggaggagcuggugaacggcauguacagaaucuacgacauggagaacgugcugcugggccuguucagcaccauccacgacagcauccaguacgugcagaagaacgccggcaagcugaccaccaccaucggcaagcugugcgcccacagccagcagagacaguacagaagcgccuacuaccccgaggaccuguucaucgacaagaaggugcugaagguggcccacguggagcacgaggagacccugagcagcagaagaagagagcugauccagaagcugaagagcuucaucagcuucuacagcgcccugcccggcuacaucugcagccacagccccguggccgagaacgacacccugugcuggaacggccaggagcugguggagagauacagccagaaggccgccagaaacggcaugaagaaccaguucaaccugcacgagcugaagaugaagggccccgagcccguggugagccagaucaucgacaagcugaagcacaucaaccagcugcugagaaccaugagcaugcccaagggcagagugcuggacaagaaccuggacgaggagggcuucgagagcggcgacugcggcgacgacgaggacgagugcaucggcggcagcggcgacggcaugaucaaggugaagaaccagcugagauuccuggccgagcuggccuacgaccuggacguggacgacgcccccggcaacagccagcaggccacccccaaggacaacgagaucagcaccuuccacaaccugggcaacgugcacagcccccugaagcugcugaccagcauggccaucagcguggugugcuucuucuuccuggugcacuga

SEQ ID NO: 2726 - RNA, 1743 nt, Artificial Sequence; identical to SEQ ID NO: 2725
  AAA93471 variant

SEQ ID NO: 2727 - RNA, 1743 nt, Artificial Sequence
  AAH35972 variant
auggccggcaccgugagaaccgccugccuggugguggccaugcugcugagccuggacuuccccggccaggcccagccccccccccccccccccgacgccaccugccaccaggugagaagcuucuuccagagacugcagcccggccugaagugggugcccgagacccccgugcccggcagcgaccugcaggugugccugcccaagggccccaccugcugcagcagaaagauggaggagaaguaccagcugaccgccagacugaacauggagcagcugcugcagagcgccagcauggagcugaaguuccugaucauccagaacgccgccguguuccaggaggccuucgagaucguggugagacacgccaagaacuacaccaacgccauguucaagaacaacuaccccagccugaccccccaggccuucgaguucgugggcgaguucuucaccgacgugagccuguacauccugggcagcgacaucaacguggacgacauggugaacgagcuguucgacagccuguuccccgugaucuacacccagcugaugaaccccggccugcccgacagcgcccuggacaucaacgagugccugagaggcgccagaagagaccugaagguguucggcaacuuccccaagcugaucaugacccaggugagcaagagccugcaggugaccagaaucuuccugcaggcccugaaccugggcaucgaggugaucaacaccaccgaccaccugaaguucagcaaggacugcggcagaaugcugaccagaaugugguacugcagcuacugccagggccugaugauggugaagcccugcggcggcuacugcaacguggugaugcagggcugcauggccggcgugguggagaucgacaaguacuggagagaguacauccugagccuggaggagcuggugaacggcauguacagaaucuacgacauggagaacgugcugcugggccuguucagcaccauccacgacagcauccaguacgugcagaagaacgccggcaagcugaccaccaccaucggcaagcugugcgcccacagccagcagagacaguacagauucgccuacuaccccgaggaccuguucaucgacaagaaggugcugaagguggcccacguggagcacgaggagacccugagcagcagaagaagagagcugauccagaagcugaagagcuucaucagcuucuacagcgcccugcccggcuacaucugcagccacagccccguggccgagaacgacacccugugcuggaacggccaggagcugguggagagauacagccagaaggccgccagaaacggcaugaagaaccaguucaaccugcacgagcugaagaugaagggccccgagcccguggugagccagaucaucgacaagcugaagcacaucaaccagcugcugagaaccaugagcaugcccaagggcagagugcuggacaagaaccuggacgaggagggcuucgagagcggcgacugcggcgacgacgaggacgagugcaucggcggcagcggcgacggcaugaucaaggugaagaaccagcugagauuccuggccgagcuggccuacgaccuggacguggacgacgcccccggcaacagccagcaggccacccccaaggacaacgagaucagcaccuuccacaaccugggcaacgugcacagcccccugaagcugcugaccagcauggccaucagcguggugugcuucuucuuccuggugcacuga

SEQ ID NO: 2728 - RNA, 1683 nt, Artificial Sequence
  EAW93784 variant
auggagugccuguacuacuuccugggcuuccugcugcuggccgccagacugccccuggacgccgccaagagauuccacgacgugcugggcaacgagagacccagcgccuacaugagagagcacaaccagcugaacggcuggagcagcgacgagaacgacuggaacgagaagcuguaccccguguggaagagaggcgacaugagauggaagaacagcuggaagggcggcagagugcaggccgugcugaccagcgacagccccgcccuggugggcagcaacaucaccuucgccgugaaccugaucuuccccagaugccagaaggaggacgccaacggcaacaucguguacgagaagaacugcagaaacgaggccggccugagcgccgaccccuacguguacaacuggaccgccuggagcgaggacagcgacggcgagaacggcaccggccagagccaccacaacguguuccccgacggcaagcccuucccccaccaccccggcuggagaagauggaacuucaucuacguguuccacacccugggccaguacuuccagaagcugggcagaugcagcgugagagugagcgugaacaccgccaacgugacccugggcccccagcugauggaggugaccguguacagaagacacggcagagccuacgugcccaucgcccaggugaaggacguguacguggugaccgaccagauccccguguucgugaccauguuccagaagaacgacagaaacagcagcgacgagaccuuccugaaggaccugcccaucauguucgacgugcugauccacgaccccagccacuuccugaacuacagcaccaucaacuacaaguggagcuucggcgacaacaccggccuguucgugagcaccaaccacaccgugaaccacaccuacgugcugaacggcaccuucagccugaaccugaccgugaaggccgccgcccccggccccugccccccccccccccccccccccagacccagcaagcccacccccagccugggccccgccggcgacaacccccuggagcugagcagaauccccgacgagaacugccagaucaacagauacggccacuuccaggccaccaucaccaucguggagggcauccuggaggugaacaucauccagaugaccgacgugcugaugcccgugcccuggcccgagagcagccugaucgacuucguggugaccugccagggcagcauccccaccgaggugugcaccaucaucagcgaccccaccugcgagaucacccagaacaccgugugcagccccguggacguggacgagaugugccugcugaccgugagaagaaccuucaacggcagcggcaccuacugcgugaaccugacccugggcgacgacaccagccuggcccugaccagcacccugaucagcgugcccgacagagaccccgccagcccccugagaauggccaacagcgcccugaucagcgugggcugccuggccaucuucgugaccgugaucagccugcugguguacaagaagcacaaggaguacaaccccaucgagaacagccccggcaacguggugagaagcaagggccugagcguguuccugaacagagccaaggccguguucuuccccggcaaccaggagaaggacccccugcugaagaaccaggaguucaagggcgugagcuga

SEQ ID NO: 2729 - RNA, 1719 nt, Artificial Sequence
  AAH32783 variant
auggagugccuguacuacuuccugggcuuccugcugcuggccgccagacugccccuggacgccgccaagagauuccacgacgugcugggcaacgagagacccagcgccuacaugagagagcacaaccagcugaacggcuggagcagcgacgagaacgacuggaacgagaagcuguaccccguguggaagagaggcgacaugagauggaagaacagcuggaagggcggcagagugcaggccgugcugaccagcgacagccccgcccuggugggcagcaacaucaccuucgccgugaaccugaucuuccccagaugccagaaggaggacgccaacggcaacaucguguacgagaagaacugcagaaacgaggccggccugagcgccgaccccuacguguacaacuggaccgccuggagcgaggacagcgacggcgagaacggcaccggccagagccaccacaacguguuccccgacggcaagcccuucccccaccaccccggcuggagaagauggaacuucaucuacguguuccacacccugggccaguacuuccagaagcugggcagaugcagcgugagagugagcgugaacaccgccaacgugacccugggcccccagcugauggaggugaccguguacagaagacacggcagagccuacgugcccaucgcccaggugaaggacguguacguggugaccgaccagauccccguguucgugaccauguuccagaagaacgacagaaacagcagcgacgagaccuuccugaaggaccugcccaucauguucgacgugcugauccacgaccccagccacuuccugaacuacagcaccaucaacuacaaguggagcuucggcgacaacaccggccuguucgugagcaccaaccacaccgugaaccacaccuacgugcugaacggcaccuucagccugaaccugaccgugaaggccgccgcccccggccccugccccccccccccccccccccccagacccagcaagcccacccccagccuggccaccacccugaagagcuacgacagcaacacccccggccccgccggcgacaacccccuggagcugagcagaauccccgacgagaacugccagaucaacagauacggccacuuccaggccaccaucaccaucguggagggcauccuggaggugaacaucauccagaugaccgacgugcugaugcccgugcccuggcccgagagcagccugaucgacuucguggugaccugccagggcagcauccccaccgaggugugcaccaucaucagcgaccccaccugcgagaucacccagaacaccgugugcagccccguggacguggacgagaugugccugcugaccgugagaagaaccuucaacggcagcggcaccuacugcgugaaccugacccugggcgacgacaccagccuggcccugaccagcacccugaucagcgugcccgacagagaccccgccagcccccugagaauggccaacagcgcccugaucagcgugggcugccuggccaucuucgugaccgugaucagccugcugguguacaagaagcacaaggaguacaaccccaucgagaacagccccggcaacguggugagaagcaagggccugagcguguuccugaacagagccaaggccguguucuuccccggcaaccaggagaaggacccccugcugaagaaccaggaguucaagggcgugagcuga

SEQ ID NO: 2730 - RNA, 621 nt, Artificial Sequence
  CAD43718 variant
auggagugccuguacuacuuccugggcuuccugcugcuggccgccagacugccccuggacgccgccaagagauuccacgacgugcugggcaacgagagacccagcgccuacaugagagagcacaaccagcugaacggcuggagcagcgacgagaacgacuggaacgagaagcuguaccccguguggaagagaggcgacaugagauggaagaacagcuggaagggcggcagagugcaggccgugcugaccagcgacagccccgcccuggugggcagcaacaucaccuucgccgugaaccugaucuuccccagaugccagaaggaggacgccaacggcaacaucguguacgagaagaacugcagaaacgaggccggccugagcgccgaccccuacguguacaacuggaccgccuggagcgaggacagcgacggcgagaacggcaccggccagagccaccacaacguguuccccgacggcaagcccuucccccaccaccccggcuggagaagauggaacuucaucuacguguuccacacccuggacuggcugcugcagacccccaagcugcugcuguaccugagccugaaguuccagcccagccuguuccugcuguacaacuga

SEQ ID NO: 2731 - RNA, 621 nt, Artificial Sequence
  AAH11595 variant
auggagugccuguacuacuuccugggcuuccugcugcuggccgccagacugccccuggacgccgccaagagauuccacgacgugcugggcaacgagagacccagcgccuacaugagagagcacaaccagcugaacggcuggagcagcgacgagaacgacuggaacgagaagcuguaccccguguggaagagaggcgacaugagauggaagaacagcuggaagggcggcagagugcaggccgugcugaccagcgacagccccgcccuggugggcagcaacaucaccuucgccgugaaccugaucuuccccagaugccagaaggaggacgccaacggcaacaucguguacgagaagaacugcagaaacgaggccggccugagcgccgaccccuacguguacaacuggaccgccuggagcgaggacagcgacggcgagaacggcaccggccagagccaccacaacguguuccccgacggcaagcccuucccccaccaccccggcuggagaagauggaacuucaucuacguguuccacacccugggcuggcugcugcagacccccaagcugcugcuguaccugagccugaaguuccagcccagccuguuccugcuguacaacuga

SEQ ID NO: 2732 - RNA, 2640 nt, Artificial Sequence
  CCDS5600.1 variant
augaagaugcugaccagacugcaggugcugacccuggcccuguucagcaagggcuuccugcugagccugggcgaccacaacuuccugagaagagagaucaagaucgagggcgaccuggugcugggcggccuguuccccaucaacgagaagggcaccggcaccgaggagugcggcagaaucaacgaggacagaggcauccagagacuggaggccaugcuguucgccaucgacgagaucaacaaggacgacuaccugcugcccggcgugaagcugggcgugcacauccuggacaccugcagcagagacaccuacgcccuggagcagagccuggaguucgugagagccagccugaccaagguggacgaggccgaguacaugugccccgacggcagcuacgccauccaggagaacaucccccugcugaucgccggcgugaucggcggcagcuacagcagcgugagcauccagguggccaaccugcugagacuguuccagaucccccagaucagcuacgccagcaccagcgccaagcugagcgacaagagcagauacgacuacuucgccagaaccgugccccccgacuucuaccaggccaaggccauggccgagauccugagauucuucaacuggaccuacgugagcaccguggccagcgagggcgacuacggcgagaccggcaucgaggccuucgagcaggaggccagacugagaaacaucugcaucgccaccgccgagaaggugggcagaagcaacaucagaaagagcuacgacagcgugaucagagagcugcugcagaagcccaacgccagagugguggugcuguucaugagaagcgacgacagcagagagcugaucgccgccgccagcagagccaacgccagcuucaccuggguggccagcgacggcuggggcgcccaggagagcaucaucaagggcagcgagcacguggccuacggcgccaucacccuggagcuggccagccagcccgugagacaguucgacagauacuuccagagccugaaccccuacaacaaccacagaaaccccugguucagagacuucugggagcagaaguuccagugcagccugcagaacaagagaaaccacagaagagugugcgacaagcaccuggccaucgacagcagcaacuacgagcaggagagcaagaucauguucguggugaacgccguguacgccauggcccacgcccugcacaagaugcagagaacccugugccccaacaccaccaagcugugcgacgccaugaagauccuggacggcaagaagcuguacaaggacuaccugcugaagaucaacuucaccgcccccuucaaccccaacaaggacgccgacagcaucgugaaguucgacaccuucggcgacggcaugggcagauacaacguguucaacuuccagaacgugggcggcaaguacagcuaccugaaggugggccacugggccgagacccugagccuggacgugaacagcauccacuggagcagaaacagcgugcccaccagccagugcagcgaccccugcgcccccaacgagaugaagaacaugcagcccggcgacgugugcugcuggaucugcauccccugcgagcccuacgaguaccuggccgacgaguucaccugcauggacugcggcagcggccaguggcccaccgccgaccugaccggcugcuacgaccugcccgaggacuacaucagaugggaggacgccugggccaucggccccgugaccaucgccugccugggcuucaugugcaccugcaugguggugaccguguucaucaagcacaacaacaccccccuggugaaggccagcggcagagagcugugcuacauccugcuguucggcgugggccugagcuacugcaugaccuucuucuucaucgccaagcccagccccgugaucugcgcccugagaagacugggccugggcagcagcuucgccaucugcuacagcgcccugcugaccaagaccaacugcaucgccagaaucuucgacggcgugaagaacggcgcccagagacccaaguucaucagccccagcagccagguguucaucugccugggccugauccuggugcagaucgugauggugagcguguggcugauccuggaggcccccggcaccagaagauacacccuggccgagaagagagagaccgugauccugaagugcaacgugaaggacagcagcaugcugaucagccugaccuacgacgugauccuggugauccugugcaccguguacgccuucaagaccagaaagugccccgagaacuucaacgaggccaaguucaucggcuucaccauguacaccaccugcaucaucuggcuggccuuccugcccaucuucuacgugaccagcagcgacuacagagugcagaccaccaccaugugcaucagcgugagccugagcggcuucguggugcugggcugccuguucgcccccaaggugcacaucauccuguuccagccccagaagaacguggugacccacagacugcaccugaacagauucagcgugagcggcaccggcaccaccuacagccagagcagcgccagcaccuacgugcccaccgugugcaacggcagagaggugcuggacagcaccaccagcagccuguga

SEQ ID NO: 2733 - RNA, 1947 nt, Artificial Sequence
  CCDS4977.1 variant
augagccaccacggcggcgcccccaaggccagcaccugggugguggccagcagaagaagcagcaccgugagcagagcccccgagagaagacccgccgaggagcugaacagaaccggccccgagggcuacagcgugggcagaggcggcagauggagaggcaccagcagaccccccgaggccguggccgccggccacgaggagcugccccugugcuucgcccugaagagccacuucgugggcgccgugaucggcagaggcggcagcaagaucaagaacauccagagcaccaccaacaccaccauccagaucauccaggagcagcccgagagccuggugaagaucuucggcagcaaggccaugcagaccaaggccaaggccgugaucgacaacuucgugaagaagcuggaggagaacuacaacagcgagugcggcaucgacaccgccuuccagcccagcgugggcaaggacggcagcaccgacaacaacgugguggccggcgacagaccccugaucgacugggaccagaucagagaggagggccugaaguggcagaagaccaagugggccgaccugccccccaucaagaagaacuucuacaaggagagcaccgccaccagcgccaugagcaagguggaggccgacagcuggagaaaggagaacuucaacaucaccugggacgaccugaaggacggcgagaagagacccauccccaaccccaccugcaccuucgacgacgccuuccagugcuaccccgaggugauggagaacaucaagaaggccggcuuccagaagcccacccccauccagagccaggccuggcccaucgugcugcagggcaucgaccugaucggcguggcccagaccggcaccggcaagacccugugcuaccugaugcccggcuucauccaccuggugcugcagcccagccugaagggccagagaaacagacccggcaugcuggugcugacccccaccagagagcuggcccugcagguggagggcgagugcugcaaguacagcuacaagggccugagaagcgugugcguguacggcggcggcaacagagacgagcagaucgaggagcugaagaagggcguggacaucaucaucgccacccccggcagacugaacgaccugcagaugagcaacuucgugaaccugaagaacaucaccuaccuggugcuggacgaggccgacaagaugcuggacaugggcuucgagccccagaucaugaagauccugcuggacgugagacccgacagacagaccgugaugaccagcgccaccuggccccacagcgugcacagacuggcccagagcuaccugaaggagcccaugaucguguacgugggcacccuggaccugguggccgugagcagcgugaagcagaacaucaucgugaccaccgaggaggagaaguggagccacaugcagaccuuccugcagagcaugagcagcaccgacaaggugaucguguucgugagcagaaaggccguggccgaccaccugagcagcgaccugauccugggcaacaucagcguggagagccugcacggcgacagagagcagagagacagagagaaggcccuggagaacuucaagaccggcaaggugagaauccugaucgccaccgaccuggccagcagaggccuggacgugcacgacgugacccacguguacaacuucgacuuccccagaaacaucgaggaguacgugcacagaaucggcagaaccggcagagccggcagaaccggcgugagcaucaccacccugaccagaaacgacuggagaguggccagcgagcugaucaacauccuggagagagccaaccagagcauccccgaggagcuggugagcauggccgagagauucaaggcccaccagcagaagagagagauggagagaaagauggagagaccccagggcagacccaagaaguuccacuga

SEQ ID NO: 2734 - RNA, 1209 nt, Artificial Sequence
  ACD02430 variant
auggcccagaaggagggcggcagaaccgugcccugcugcagcagacccaagguggccgcccugaccgccggcacccugcugcugcugaccgccaucggcgccgccagcugggccaucguggccgugcugcugagaagcgaccaggagccccuguaccccgugcaggugagcagcgccgacgccagacugaugguguucgacaagaccgagggcaccuggagacugcugugcagcagcagaagcaacgccagaguggccggccugagcugcgaggagaugggcuuccugagagcccugacccacagcgagcuggacgugagaaccgccggcgccaacggcaccagcggcuucuucugcguggacgagggcagacugccccacacccagagacugcuggaggugaucagcgugugcgacugccccagaggcagauuccuggccgccaucugccaggacugcggcagaagaaagcugcccguggacagaaucgugggcggcagagacaccagccugggcagauggcccuggcaggugagccugagauacgacggcgcccaccugugcggcggcagccugcugagcggcgacugggugcugaccgccgcccacugcuuccccgagagaaacagagugcugagcagauggagaguguucgccggcgccguggcccaggccagcccccacggccugcagcugggcgugcaggccgugguguaccacggcggcuaccugcccuucagagaccccaacagcgaggagaacagcaacgacaucgcccuggugcaccugagcagcccccugccccugaccgaguacauccagcccgugugccugcccgccgccggccaggcccugguggacggcaagaucugcaccgugaccggcuggggcaacacccaguacuacggccagcaggccggcgugcugcaggaggccagagugcccaucaucagcaacgacgugugcaacggcgccgacuucuacggcaaccagaucaagcccaagauguucugcgccggcuaccccgagggcggcaucgacgccugccagggcgacagcggcggccccuucgugugcgaggacagcaucagcagaacccccagauggagacugugcggcaucgugagcuggggcaccggcugcgcccuggcccagaagcccggcguguacaccaaggugagcgacuucagagaguggaucuuccaguga

SEQ ID NO: 2735 - RNA, 1254 nt, Artificial Sequence
  AAA36013 variant
auggcccagaaggagggcggcagaaccgugcccugcugcagcagacccaagguggccgcccugaccgccggcacccugcugcugcugaccgccaucggcgccgccagcugggccaucguggccgugcugcugagaagcgaccaggagccccuguaccccgugcaggugagcagcgccgacgccagacugaugguguucgacaagaccgagggcaccuggagacugcugugcagcagcagaagcaacgccagaguggccggccugagcugcgaggagaugggcuuccugagagcccugacccacagcgagcuggacgugagaaccgccggcgccaacggcaccagcggcuucuucugcguggacgagggcagacugccccacacccagagacugcuggaggugaucagcgugugcgacugccccagaggcagauuccuggccgccaucugccaggacugcggcagaagaaagcugcccguggacagaaucgugggcggcagagacaccagccugggcagauggcccuggcaggugagccugagauacgacggcgcccaccugugcggcggcagccugcugagcggcgacugggugcugaccgccgcccacugcuuccccgagagaaacagagugcugagcagauggagaguguucgccggcgccguggcccaggccagcccccacggccugcagcugggcgugcaggccgugguguaccacggcggcuaccugcccuucagagaccccaacagcgaggagaacagcaacgacaucgcccuggugcaccugagcagcccccugccccugaccgaguacauccagcccgugugccugcccgccgccggccaggcccugguggacggcaagaucugcaccgugaccggcuggggcaacacccaguacuacggccagcaggccggcgugcugcaggaggccagagugcccaucaucagcaacgacgugugcaacggcgccgacuucuacggcaaccagaucaagcccaagauguucugcgccggcuaccccgagggcggcaucgacgccugccagggcgacagcggcggccccuucgugugcgaggacagcaucagcagaacccccagauggagacugugcggcaucgugagcuggggcaccggcugcgcccuggcccagaagcccggcguguacaccaaggugagcgacuucagagaguggaucuuccaggccaucaagacccacagcgaggccagcggcauggugacccagcuguga

SEQ ID NO: 2736 - RNA, 2940 nt, Artificial Sequence
  BAG62073 variant
auggagcuggccgcccugugcagauggggccugcugcuggcccugcugccccccggcgccgccagcacccaggacaacuaccugagcaccgacgugggcagcugcacccuggugugcccccugcacaaccaggaggugaccgccgaggacggcacccagagaugcgagaagugcagcaagcccugcgccagagugugcuacggccugggcauggagcaccugagagaggugagagccgugaccagcgccaacauccaggaguucgccggcugcaagaagaucuucggcagccuggccuuccugcccgagagcuucgacggcgaccccgccagcaacaccgccccccugcagcccgagcagcugcagguguucgagacccuggaggagaucaccggcuaccuguacaucagcgccuggcccgacagccugcccgaccugagcguguuccagaaccugcaggugaucagaggcagaauccugcacaacggcgccuacagccugacccugcagggccugggcaucagcuggcugggccugagaagccugagagagcugggcagcggccuggcccugauccaccacaacacccaccugugcuucgugcacaccgugcccugggaccagcuguucagaaacccccaccaggcccugcugcacaccgccaacagacccgaggacgagugcgugggcgagggccuggccugccaccagcugugcgccagaggccacugcuggggccccggccccacccagugcgugaacugcagccaguuccugagaggccaggagugcguggaggagugcagagugcugcagggccugcccagagaguacgugaacgccagacacugccugcccugccaccccgagugccagccccagaacggcagcgugaccugcuucggccccgaggccgaccagugcguggccugcgcccacuacaaggacccccccuucugcguggccagaugccccagcggcgugaagcccgaccugagcuacaugcccaucuggaaguuccccgacgaggagggcgccugccagcccugccccaucaacugcacccacagcugcguggaccuggacgacaagggcugccccgccgagcagagagccagcccccugaccagcaucaucagcgccguggugggcauccugcuggugguggugcugggcgugguguucggcauccugaucaagagaagacagcagaagaucagaaaguacaccaugagaagacugcugcaggagaccgagcugguggagccccugacccccagcggcgccaugcccaaccaggcccagaugagaauccugaaggagaccgagcugagaaaggugaaggugcugggcagcggcgccuucggcaccguguacaagggcaucuggauccccgacggcgagaacgugaagauccccguggccaucaaggugcugagagagaacaccagccccaaggccaacaaggagauccuggacgaggccuacgugauggccggcgugggcagccccuacgugagcagacugcugggcaucugccugaccagcaccgugcagcuggugacccagcugaugcccuacggcugccugcuggaccacgugagagagaacagaggcagacugggcagccaggaccugcugaacuggugcaugcagaucgccaagggcaugagcuaccuggaggacgugagacuggugcacagagaccuggccgccagaaacgugcuggugaagagccccaaccacgugaagaucaccgacuucggccuggccagacugcuggacaucgacgagaccgaguaccacgccgacggcggcaaggugcccaucaaguggauggcccuggagagcauccugagaagaagauucacccaccagagcgacguguggagcuacggcgugaccgugugggagcugaugaccuucggcgccaagcccuacgacggcauccccgccagagagauccccgaccugcuggagaagggcgagagacugccccagccccccaucugcaccaucgacguguacaugaucauggugaagugcuggaugaucgacagcgagugcagacccagauucagagagcuggugagcgaguucagcagaauggccagagacccccagagauucguggugauccagaacgaggaccugggccccgccagcccccuggacagcaccuucuacagaagccugcuggaggacgacgacaugggcgaccugguggacgccgaggaguaccuggugccccagcagggcuucuucugccccgaccccgcccccggcgccggcggcauggugcaccacagacacagaagcagcagcaccagaagcggcggcggcgaccugacccugggccuggagcccagcgaggaggaggcccccagaagcccccuggcccccagcgagggcgccggcagcgacguguucgacggcgaccugggcaugggcgccgccaagggccugcagagccugcccacccacgaccccagcccccugcagagauacagcgaggaccccaccgugccccugcccagcgagaccgacggcuacguggccccccugaccugcagcccccagcccgaguacgugaaccagcccgacgugagaccccagccccccagccccagagagggcccccugcccgccgccagacccgccggcgccacccuggagagacccaagacccugagccccggcaagaacggcguggugaaggacguguucgccuucggcggcgccguggagaaccccgaguaccugaccccccagggcggcgccgccccccagccccaccccccccccgccuucagccccgccuucgacaaccuguacuacugggaccaggacccccccgagagaggcgccccccccagcaccuucaagggcacccccaccgccgagaaccccgaguaccugggccuggacgugcccguguga

SEQ ID NO: 2737 - RNA, 264 nt, Artificial Sequence
  CCQ43016 variant
augaugagaaugaagaccuucgugaugauccacuuccaccugaugaacggcggcaaggccaagcuguacagcagaccccacgccaagcugcugcccgagcagagagugaccgacaagaccggcgcccccguggaguggcccggccagacccagugcagcaccgagacccagacccuggccgccaugcccgcccaggccgugaugagagugaccugcaccgugguggacaugcacaagagcgagugcgcccccgcccagaccuga

SEQ ID NO: 2738 - RNA, 3768 nt, Artificial Sequence
  AAI67147 variant
auggagcuggccgcccugugcagauggggccugcugcuggcccugcugccccccggcgccgccagcacccaggugugcaccggcaccgacaugaagcugagacugcccgccagccccgagacccaccuggacaugcugagacaccuguaccagggcugccagguggugcagggcaaccuggagcugaccuaccugcccaccaacgccagccugagcuuccugcaggacauccaggaggugcagggcuacgugcugaucgcccacaaccaggugagacaggugccccugcagagacugagaaucgugagaggcacccagcuguucgaggacaacuacgcccuggccgugcuggacaacggcgacccccugaacaacaccacccccgugaccggcgccagccccggcggccugagagagcugcagcugagaagccugaccgagauccugaagggcggcgugcugauccagagaaacccccagcugugcuaccaggacaccauccuguggaaggacaucuuccacaagaacaaccagcuggcccugacccugaucgacaccaacagaagcagagccugccaccccugcagccccaugugcaagggcagcagaugcuggggcgagagcagcgaggacugccagagccugaccagaaccgugugcgccggcggcugcgccagaugcaagggcccccugcccaccgacugcugccacgagcagugcgccgccggcugcaccggccccaagcacagcgacugccuggccugccugcacuucaaccacagcggcaucugcgagcugcacugccccgcccuggugaccuacaacaccgacaccuucgagagcaugcccaaccccgagggcagauacaccuucggcgccagcugcgugaccgccugccccuacaacuaccugagcaccgacgugggcagcugcacccuggugugcccccugcacaaccaggaggugaccgccgaggacggcacccagagaugcgagaagugcagcaagcccugcgccagagugugcuacggccugggcauggagcaccugagagaggugagagccgugaccagcgccaacauccaggaguucgccggcugcaagaagaucuucggcagccuggccuuccugcccgagagcuucgacggcgaccccgccagcaacaccgccccccugcagcccgagcagcugcagguguucgagacccuggaggagaucaccggcuaccuguacaucagcgccuggcccgacagccugcccgaccugagcguguuccagaaccugcaggugaucagaggcagaauccugcacaacggcgccuacagccugacccugcagggccugggcaucagcuggcugggccugagaagccugagagagcugggcagcggccuggcccugauccaccacaacacccaccugugcuucgugcacaccgugcccugggaccagcuguucagaaacccccaccaggcccugcugcacaccgccaacagacccgaggacgagugcgugggcgagggccuggccugccaccagcugugcgccagaggccacugcuggggccccggccccacccagugcgugaacugcagccaguuccugagaggccaggagugcguggaggagugcagagugcugcagggccugcccagagaguacgugaacgccagacacugccugcccugccaccccgagugccagccccagaacggcagcgugaccugcuucggccccgaggccgaccagugcguggccugcgcccacuacaaggacccccccuucugcguggccagaugccccagcggcgugaagcccgaccugagcuacaugcccaucuggaaguuccccgacgaggagggcgccugccagcccugccccaucaacugcacccacagcugcguggaccuggacgacaagggcugccccgccgagcagagagccagcccccugaccagcaucaucagcgccguggugggcauccugcuggugguggugcugggcgugguguucggcauccugaucaagagaagacagcagaagaucagaaaguacaccaugagaagacugcugcaggagaccgagcugguggagccccugacccccagcggcgccaugcccaaccaggcccagaugagaauccugaaggagaccgagcugagaaaggugaaggugcugggcagcggcgccuucggcaccguguacaagggcaucuggauccccgacggcgagaacgugaagauccccguggccaucaaggugcugagagagaacaccagccccaaggccaacaaggagauccuggacgaggccuacgugauggccggcgugggcagccccuacgugagcagacugcugggcaucugccugaccagcaccgugcagcuggugacccagcugaugcccuacggcugccugcuggaccacgugagagagaacagaggcagacugggcagccaggaccugcugaacuggugcaugcagaucgccaagggcaugagcuaccuggaggacgugagacuggugcacagagaccuggccgccagaaacgugcuggugaagagccccaaccacgugaagaucaccgacuucggccuggccagacugcuggacaucgacgagaccgaguaccacgccgacggcggcaaggugcccaucaaguggauggcccuggagagcauccugagaagaagauucacccaccagagcgacguguggagcuacggcgugaccgugugggagcugaugaccuucggcgccaagcccuacgacggcauccccgccagagagauccccgaccugcuggagaagggcgagagacugccccagccccccaucugcaccaucgacguguacaugaucauggugaagugcuggaugaucgacagcgagugcagacccagauucagagagcuggugagcgaguucagcagaauggccagagacccccagagauucguggugauccagaacgaggaccugggccccgccagcccccuggacagcaccuucuacagaagccugcuggaggacgacgacaugggcgaccugguggacgccgaggaguaccuggugccccagcagggcuucuucugccccgaccccgcccccggcgccggcggcauggugcaccacagacacagaagcagcagcaccagaagcggcggcggcgaccugacccugggccuggagcccagcgaggaggaggcccccagaagcccccuggcccccagcgagggcgccggcagcgacguguucgacggcgaccugggcaugggcgccgccaagggccugcagagccugcccacccacgaccccagcccccugcagagauacagcgaggaccccaccgugccccugcccagcgagaccgacggcuacguggccccccugaccugcagcccccagcccgaguacgugaaccagcccgacgugagaccccagccccccagccccagagagggcccccugcccgccgccagacccgccggcgccacccuggagagacccaagacccugagccccggcaagaacggcguggugaaggacguguucgccuucggcggcgccguggagaaccccgaguaccugaccccccagggcggcgccgccccccagccccaccccccccccgccuucagccccgccuucgacaaccuguacuacugggaccaggacccccccgagagaggcgccccccccagcaccuucaagggcacccccaccgccgagaaccccgaguaccugggccuggacgugcccguguga

SEQ ID NO: 2739 - RNA, 1260 nt, Artificial Sequence
  AAD56009 variant
auggagcuggccgcccugugcagauggggccugcugcuggcccugcugccccccggcgccgccagcacccaggugugcaccggcaccgacaugaagcugagacugcccgccagccccgagacccaccuggacaugcugagacaccuguaccagggcugccagguggugcagggcaaccuggagcugaccuaccugcccaccaacgccagccugagcuuccugcaggacauccaggaggugcagggcuacgugcugaucgcccacaaccaggugagacaggugccccugcagagacugagaaucgugagaggcacccagcuguucgaggacaacuacgcccuggccgugcuggacaacggcgacccccugaacaacaccacccccgugaccggcgccagccccggcggccugagagagcugcagcugagaagccugaccgagauccugaagggcggcgugcugauccagagaaacccccagcugugcuaccaggacaccauccuguggaaggacaucuuccacaagaacaaccagcuggcccugacccugaucgacaccaacagaagcagagccugccaccccugcagccccaugugcaagggcagcagaugcuggggcgagagcagcgaggacugccagagccugaccagaaccgugugcgccggcggcugcgccagaugcaagggcccccugcccaccgacugcugccacgagcagugcgccgccggcugcaccggccccaagcacagcgacugccuggccugccugcacuucaaccacagcggcaucugcgagcugcacugccccgcccuggugaccuacaacaccgacaccuucgagagcaugcccaaccccgagggcagauacaccuucggcgccagcugcgugaccgccugccccuacaacuaccugagcaccgacgugggcagcugcacccuggugugcccccugcacaaccaggaggugaccgccgaggacggcacccagagaugcgagaagugcagcaagcccugcgccagaggcacccacagccugccccccagacccgccgccgugcccgugccccugagaaugcagcccggccccgcccaccccgugcugagcuuccugagacccagcugggaccuggugagcgccuucuacagccugccccuggccccccugagccccaccagcgugcccaucagccccgugagcgugggcagaggccccgaccccgacgcccacguggccguggaccugagcagauacgagggcuga

SEQ ID NO: 2740 - RNA, 546 nt, Artificial Sequence
  U70863.1 variant
ggcagccacagcaugagauacuucuucaccagcgugagcagacccggcagaggcgagcccagauucaucgccgugggcuacguggacgacacccaguucgugagauucgacagcgacgccgccagccagagaauggagcccagagcccccuggaucgagcaggagggccccgaguacugggacggcgagaccagaaaggugaaggcccacagccagacccacagaguggaccugggcacccugagaggcuacuacaaccagagcgaggccggcagccacaccgugcagagaauguacggcugcgacgugggcagcgacuggagauuccugagaggcuaccaccaguacgccuacgacggcaaggacuacaucgcccugaaggaggaccugagaagcuggaccgccgccgacauggccgcccagaccaccaagcacaagugggagaccgcccacguggccgagcagcugagagccuaccuggagggcaccugcguggaguggcugagaagauaccuggagaacggcaaggagacccugcagagaacc

SEQ ID NO: 2741 - RNA, 543 nt, Artificial Sequence
  AH009136.2 variant
agccacagcaugagauacuucuucaccagcgugagcagacccggcagaggcgagcccagauucaucgccgugggcuacguggacgacacccaguucgugagauucgacagcgacgccgccagccagagaauggagcccagagcccccuggaucgagcaggagggccccgaguacugggacggcgagaccagaaaggugaaggcccacagccagacccacagaguggaccugggcacccugagaggcuacuacaaccagagcgaggccggcagccacaccgugcagagaauguacggcugcgacgugggcagcgacuggagauuccugagaggcuaccaccaguacgccuacgacggcaaggacuacaucgcccugaaggaggaccugagaagcuggaccgccgccgacauggccgcccagaccaccaagcacaagugggaggccgcccacguggccgagcagcugagagccuaccuggagggcaccugcguggaguggcugagaagauaccuggagaacggcaaggagacccugcagagaacc

SEQ ID NO: 2742 - RNA, 705 nt, Artificial Sequence
  AAG09781 variant
augcugagagugcccgagcccagacccggcgaggccaaggccgagggcgccgccccccccacccccagcaagccccugaccagcuuccugauccaggacauccugagagacggcgcccagagacagggcggcagaaccagcagccagagacagagagaccccgagcccgagcccgagcccgagcccgagggcggcagaagcagagccggcgcccagaacgaccagcugagcaccggccccagagccgcccccgaggaggccgagacccuggccgagaccgagcccgagagacaccugggcagcuaccugcuggacagcgagaacaccagcggcgcccugcccagacugccccagacccccaagcagccccagaagagaagcagagccgccuucagccacacccaggugaucgagcuggagagaaaguucagccaccagaaguaccugagcgcccccgagagagcccaccuggccaagaaccugaagcugaccgagacccaggugaagaucugguuccagaacagaagauacaagaccaagagaaagcagcugagcagcgagcugggcgaccuggagaagcacagcagccugcccgcccugaaggaggaggccuucagcagagccagccuggugagcguguacaacagcuaccccuacuaccccuaccuguacugcgugggcagcuggagccccgccuucugguga

SEQ ID NO: 2743 - RNA, 942 nt, Artificial Sequence
  BAG37303 variant
auggccagcuucagaaagcugacccugagcgagaaggugccccccaaccaccccagcagaaagaaggugaacuuccuggacaugagccuggacgacaucaucaucuacaaggagcuggagggcaccaacgccgaggaggagaagaacaagagacagaaccacagcaagaaggagagccccagcagacagcagagcaaggcccacagacacagacacagaagagacuacagcagaugcagaagcaacagcgaggagggcaaccacgacaagaagcccagccagaagcccagcggcuucaagagcggccagcacccccugaacggccagccccugaucgagcaggagaagugcagcgacaacuacgaggcccaggccgagaagaaccagggccagagcgagggcaaccagcaccagagcgagggcaaccccgacaagagcgaggagagccagggccagcccgaggagaaccaccacagcgagagaagcagaaaccaccuggagagaagccugagccagagcgacagaagccagggccagcugaagagacaccacccccaguacgagagaagccacggccaguacaagagaagccacggccagagcgagagaagccacggccacagcgagagaagccacggccacagcgagagaagccacggccacagcgagagaagccacggccacagcaagagaagcagaagccagggcgaccugguggacacccagagcgaccugaucgccacccagagagaccugaucgccacccagaaggaccugaucgccacccagagagaccugaucgccacccagagagaccugaucgugacccagagagaccugguggccaccgagagagaccugaucaaccagagcggcagaagccacggccagagcgagagacaccagagauacagcaccggcaagaacaccaucaccaccuga

SEQ ID NO: 2744 - RNA, 942 nt, Artificial Sequence
  AAI28135 variant
auggccagcuucagaaagcugacccugagcgagaaggugccccccaaccaccccagcagaaagaaggugaacuuccuggacaugagccuggacgacaucaucaucuacaaggagcuggagggcaccaacgccgaggaggagaagaacaagagacagaaccacagcaagaaggagagccccagcagacagcagagcaaggcccacagacacagacacagaagaggcuacagcagaugcagaagcaacagcgaggagggcaaccacgacaagaagcccagccagaagcccagcggcuucaagagcggccagcacccccugaacggccagccccugaucgagcaggagaagugcagcgacaacuacgaggcccaggccgagaagaaccagggccagagcgagggcaaccagcaccagagcgagggcaaccccgacaagagcgaggagagccagggccagcccgaggagaaccaccacagcgagagaagcagaaaccaccuggagagaagccugagccagagcgacagaagccagggccagcugaagagacaccacccccaguacgagagaagccacggccaguacaagagaagccacggccagagcgagagaagccacggccacagcgagagaagccacggccacagcgagagaagccacggccacagcgagagaagccacggccacagcaagagaagcagaagccagggcgaccugguggacacccagagcgaccugaucgccacccagagagaccugaucgccacccagaaggaccugaucgccacccagagagaccugaucgccacccagagagaccugaucgugacccagagagaccugguggccaccgagagagaccugaucaaccagagcggcagaagccacggccagagcgagagacaccagagauacagcaccggcaagaacaccaucaccaccuga

SEQ ID NO: 2745 - RNA, 384 nt, Artificial Sequence
  12543784 variant
augaucaagaagaaccugaagaagcugggcaucgaggagaccuaccugaacaucaucaaggccaucuacgacagacccaccgccagcauccagaagaccgagaaccugagcaccaagaccggcaccagccaggaguaccaccugagcccccugugguucuacaucgugcuggagauccuggccagcaccaucagacaggagaagaaccugaaggacauccacaccgagaaggaggaggugaagcugagccuguucgccgacgccaugauccuguaccugaagaagcccaacgacagcaccagaaagcugcuggagcugaucaagaagauccacagcagcugcagaaucaagaucaacauccacuucgccuucugcagccaguga

SEQ ID NO: 2746 - RNA, 1926 nt, Artificial Sequence
  AAA63226 variant
auggccaaggccgccgccaucggcaucgaccugggcaccaccuacagcugcgugggcguguuccagcacggcaagguggagaucaucgccaacgaccagggcaacagaaccacccccagcuacguggccuucaccgacaccgagagacugaucggcgacgccgccaagaaccagguggcccugaacccccagaacaccguguucgacgccaagagacugaucggcagaaaguucggcgaccccguggugcagagcgacaugaagcacuggcccuuccaggugaucaacgacggcgacaagcccaaggugcaggugagcuacaagggcgagaccaaggccuucuaccccgaggagaucagcagcauggugcugaccaagaugaaggagaucgccgaggccuaccugggcuaccccgugaccaacgccgugaucaccgugcccgccuacuucaacgacagccagagacaggccaccaaggacgccggcgugaucgccggccugaacgugcugagaaucaucaacgagcccaccgccgccgccaucgccuacggccuggacagaaccggcaagggcgagagaaacgugcugaucuucgaccugggcggcggcaccuucgacgugagcauccugaccaucgacgacggcaucuucgaggugaaggccaccgccggcgacacccaccugggcggcgaggacuucgacaacagacuggugaaccacuucguggaggaguucaagagaaagcacaagaaggacaucagccagaacaagagagccgugagaagacugagaaccgccugcgagagagccaagagaacccugagcagcagcacccaggccagccuggagaucgacagccuguucgagggcaucgacuucuacaccagcaucaccagagccagauucgaggagcugugcagcgaccuguucagaagcacccuggagcccguggagaaggcccugagagacgccaagcuggacaaggcccagauccacgaccuggugcuggugggcggcagcaccagaauccccaaggugcagaagcugcugcaggacuucuucaacggcagagaccugaacaagagcaucaaccccgacgaggccguggccuacggcgccgccgugcaggccgccauccugaugggcgacaagagcgagaacgugcaggaccugcugcugcuggacguggccccccugagccugggccuggagaccgccggcggcgugaugaccgcccugaucaagagaaacagcaccauccccaccaagcagacccagaucuucaccaccuacagcgacaaccagcccggcgugcugauccagguguacgagggcgagagagccaugaccaaggacaacaaccugcugggcagauucgagcugagcggcaucccccccgcccccagaggcgugccccagaucgaggugaccuucgacaucgacgccaacggcauccugaacgugaccgccaccgacaagagcaccggcaaggccaacaagaucaccaucaccaacgacaagggcagacugagcaaggaggagaucgagagaauggugcaggaggccgagaaguacaaggccgaggacgaggugcagagagagagagugagcgccaagaacgcccuggagagcuacgccuucaacaugaagagcgccguggaggacgagggccugaagggcaagaucagcgaggccgacaagaagaaggugcuggacaagugccaggaggugaucagcuggcuggacgccaacacccuggccgagaaggacgaguucgagcacaagagaaaggagcuggagcaggugugcaaccccaucaucagcggccuguaccagggcgccggcggccccggccccggcggcuucggcgcccagggccccaagggcggcagcggcagcggccccaccaucgaggagguggacuga

SEQ ID NO: 2747 - RNA, 1926 nt, Artificial Sequence; identical to SEQ ID NO: 2746
  AAA63227 variant

SEQ ID NO: 2748 - RNA, 627 nt, Artificial Sequence
  AAI21098 variant
auggcccugggccagaagcuguucaucaccaugagcagaggcgccggcagacugcagggcacccugugggcccugguguuccugggcauccuggugggcaugguggugcccagccccgccggcaccagagccaacaacacccugcuggacagcagaggcuggggcacccugcugagcagaagcagagccggccuggccggcgagaucgccggcgugaacugggagagcggcuaccuggugggcaucaagagacagagaagacuguacugcaacgugggcaucggcuuccaccugcaggugcugcccgacggcagaaucagcggcacccacgaggagaaccccuacagccugcuggagaucagcaccguggagagaggcguggugagccuguucggcgugagaagcgcccuguucguggccaugaacagcaagggcagacuguacgccacccccagcuuccaggaggagugcaaguucagagagacccugcugcccaacaacuacaacgccuacgagagcgaccuguaccagggcaccuacaucgcccugagcaaguacggcagagugaagagaggcagcaaggugagccccaucaugaccgugacccacuuccugcccagaaucuga

SEQ ID NO: 2749 - RNA, 1569 nt, Artificial Sequence
  BAA74724 variant
augcccagagcccccagaugcagagccgugagaagccugcugagaagccacuacagagaggugcugccccuggccaccuucgugagaagacugggcccccagggcuggagacuggugcagagaggcgaccccgccgccuucagagcccugguggcccagugccuggugugcgugcccugggacgccagacccccccccgccgcccccagcuucagacaggugagcugccugaaggagcugguggccagagugcugcagagacugugcgagagaggcgccaagaacgugcuggccuucggcuucgcccugcuggacggcgccagaggcggcccccccgaggccuucaccaccagcgugagaagcuaccugcccaacaccgugaccgacgcccugagaggcagcggcgccuggggccugcugcugagaagagugggcgacgacgugcuggugcaccugcuggccagaugcgcccuguucgugcugguggcccccagcugcgccuaccaggugugcggccccccccuguaccagcugggcgccgccacccaggccagaccccccccccacgccagcggccccagaagaagacugggcugcgagagagccuggaaccacagcgugagagaggccggcgugccccugggccugcccgcccccggcgccagaagaagaggcggcagcgccagcagaagccugccccugcccaagagacccagaagaggcgccgcccccgagcccgagagaacccccgugggccagggcagcugggcccaccccggcagaaccagaggccccagcgacagaggcuucugcguggugagccccgccagacccgccgaggaggccaccagccuggagggcgcccugagcggcaccagacacagccaccccagcgugggcagacagcaccacgccggcccccccagcaccagcagaccccccagacccugggacacccccugcccccccguguacgccgagaccaagcacuuccuguacagcagcggcgacaaggagcagcugagacccagcuuccugcugagcagccugagacccauccugaccggcgccagaagacugguggagaccaucuuccugggcagcagccccggcugccagggccugcccgccggcugccccgccugccccagcgccaccggcaagugcggccccugcuucuggagcugccugggcaccaccagaagcgcccccaccggcugcagcagcagaagaaccgccagaugcgagcugagaagcccccagcagcccgugagcgugcccggcagaagccccagagcccuguggagaccccccagaagaagaacccagacccccguggccuggugcagcugcagcgccagcaccgccccccuggccggcgugagacugagagccggccugcccgcccccgccggcgcccccagaccccugggccugcaggcccagagaagaagauuccugagaaacaccaagaaguucaucagccugggcaagcacgccaagcugagccugcaggagcugaccuggaagaugagcgugagagacugcgccuggcugagaagaagcccc

SEQ ID NO: 2750 - RNA, 1680 nt, Artificial Sequence
  BAA23606 variant
augagacugcacagacugagagccagacugagcgccguggccugcggccugcugcugcugcuggugagaggccagggccaggacagcgccagccccaucagaaccacccacaccggccaggugcugggcagccuggugcacgugaagggcgccaacgccggcgugcagaccuuccugggcauccccuucgccaagcccccccugggcccccugagauucgccccccccgagccccccgagagcuggagcggcgugagagacggcaccacccaccccgccaugugccugcaggaccugaccgccguggagagcgaguuccugagccaguucaacaugaccuuccccagcgacagcaugagcgaggacugccuguaccugagcaucuacacccccgcccacagccacgagggcagcaaccugcccgugaugguguggauccacggcggcgcccugguguucggcauggccagccuguacgacggcagcaugcuggccgcccuggagaacguggugguggugaucauccaguacagacugggcgugcugggcuucuucagcaccggcgacaagcacgccaccggcaacuggggcuaccuggaccagguggccgcccugagaugggugcagcagaacaucgcccacuucggcggcaaccccgacagagugaccaucuucggcgagagcgccggcggcaccagcgugagcagccugguggugagccccaucagccagggccuguuccacggcgccaucauggagagcggcguggcccugcugcccggccugaucgccagcagcgccgacgugaucagcaccgugguggccaaccugagcgccugcgaccagguggacagcgaggcccuggugggcugccugagaggcaagagcaaggaggagauccuggccaucaacaagcccuucaagaugauccccggcgugguggacggcguguuccugcccagacacccccaggagcugcuggccagcgccgacuuccagcccgugcccagcaucgugggcgugaacaacaacgaguucggcuggcugauccccaaggugaugagaaucuacgacacccagaaggagauggacagagaggccagccaggccgcccugcagaagaugcugacccugcugaugcugccccccaccuucggcgaccugcugagagaggaguacaucggcgacaacggcgacccccagacccugcaggcccaguuccaggagaugauggccgacagcauguucgugauccccgcccugcagguggcccacuuccagugcagcagagcccccguguacuucuacgaguuccagcaccagcccagcuggcugaagaacaucagacccccccacaugaaggccgaccacggcgacgagcugcccuucguguucagaagcuucuucggcggcaacuacaucaaguucaccgaggaggaggagcagcugagcagaaagaugaugaaguacugggccaacuucgccagaaacggcaaccccaacggcgagggccugccccacuggccccuguucgaccaggaggagcaguaccugcagcugaaccugcagcccgccgugggcagagcccugaaggcccacagacugcaguucuggaagaaggcccugccccagaagauccaggagcuggaggagcccgaggagagacacaccgagcuguga

SEQ ID NO: 2751 - RNA, 1740 nt, Artificial Sequence
  AAH65269 variant
augaacaagcuguacaucggcaaccugagcgagaacgccgcccccagcgaccuggagagcaucuucaaggacgccaagauccccgugagcggccccuuccuggugaagaccggcuacgccuucguggacugccccgacgagagcugggcccugaaggccaucgaggcccugagcggcaagaucgagcugcacggcaagcccaucgagguggagcacagcgugcccaagagacagagaaucagaaagcugcagaucagaaacauccccccccaccugcagugggaggugcuggacagccugcuggugcaguacggcgugguggagagcugcgagcaggugaacaccgacagcgagaccgccguggugaacgugaccuacagcagcaaggaccaggccagacaggcccuggacaagcugaacggcuuccagcuggagaacuucacccugaagguggccuacauccccgacgagauggccgcccagcagaacccccugcagcagcccagaggcagaagaggccugggccagagaggcagcagcagacagggcagccccggcagcgugagcaagcagaagcccugcgaccugccccugagacugcuggugcccacccaguucgugggcgccaucaucggcaaggagggcgccaccaucagaaacaucaccaagcagacccagagcaagaucgacgugcacagaaaggagaacgccggcgccgccgagaagagcaucaccauccugagcacccccgagggcaccagcgccgccugcaagagcauccuggagaucaugcacaaggaggcccaggacaucaaguucaccgaggagaucccccugaagauccuggcccacaacaacuucgugggcagacugaucggcaaggagggcagaaaccugaagaagaucgagcaggacaccgacaccaagaucaccaucagcccccugcaggagcugacccuguacaaccccgagagaaccaucaccgugaagggcaacguggagaccugcgccaaggccgaggaggagaucaugaagaagaucagagagagcuacgagaacgacaucgccagcaugaaccugcaggcccaccugauccccggccugaaccugaacgcccugggccuguucccccccaccagcggcaugcccccccccaccagcggcccccccagcgccaugaccccccccuacccccaguucgagcagagcgagaccgagaccgugcaccuguucauccccgcccugagcgugggcgccaucaucggcaagcagggccagcacaucaagcagcugagcagauucgccggcgccagcaucaagaucgcccccgccgaggcccccgacgccaaggugagaauggugaucaucaccggcccccccgaggcccaguucaaggcccagggcagaaucuacggcaagaucaaggaggagaacuucgugagccccaaggaggaggugaagcuggaggcccacaucagagugcccagcuucgccgccggcagagugaucggcaagggcggcaagaccgugaacgagcugcagaaccugagcagcgccgaggugguggugcccagagaccagacccccgacgagaacgaccaggugguggugaagaucaccggccacuucuacgccugccagguggcccagagaaagauccaggagauccugacccaggugaagcagcaccagcagcagaaggcccugcagagcggccccccccagagcagaagaaaguga

SEQ ID NO: 2752 - RNA, 537 nt, Artificial Sequence
  AAA63207 variant
augcacagcagcgcccugcugugcugccuggugcugcugaccggcgugagagccagccccggccagggcacccagagcgagaacagcugcacccacuuccccggcaaccugcccaacaugcugagagaccugagagacgccuucagcagagugaagaccuucuuccagaugaaggaccagcuggacaaccugcugcugaaggagagccugcuggaggacuucaagggcuaccugggcugccaggcccugagcgagaugauccaguucuaccuggaggaggugaugccccaggccgagaaccaggaccccgacaucaaggcccacgugaacagccugggcgagaaccugaagacccugagacugagacugagaagaugccacagauuccugcccugcgagaacaagagcaaggccguggagcaggugaagaacgccuucaacaagcugcaggagaagggcaucuacaaggccaugagcgaguucgacaucuucaucaacuacaucgaggccuacaugaccaugaagaucagaaacuga

SEQ ID NO: 2753 - RNA, 1143 nt, Artificial Sequence
  AAB17170 variant
auggccuucgugugccuggccaucggcugccuguacaccuuccugaucagcaccaccuucggcugcaccagcagcagcgacaccgagaucaaggugaaccccccccaggacuucgagaucguggaccccggcuaccugggcuaccuguaccugcaguggcagcccccccugagccuggaccacuucaaggagugcaccguggaguacgagcugaaguacagaaacaucggcagcgagaccuggaagaccaucaucaccaagaaccugcacuacaaggacggcuucgaccugaacaagggcaucgaggccaagauccacacccugcugcccuggcagugcaccaacggcagcgaggugcagagcagcugggccgagaccaccuacuggaucagcccccagggcauccccgagaccaaggugcaggacauggacugcguguacuacaacuggcaguaccugcugugcagcuggaagcccggcaucggcgugcugcuggacaccaacuacaaccuguucuacugguacgagggccuggaccacgcccugcagugcguggacuacaucaaggccgacggccagaacaucggcugcagauuccccuaccuggaggccagcgacuacaaggacuucuacaucugcgugaacggcagcagcgagaacaagcccaucagaagcagcuacuucaccuuccagcugcagaacaucgugaagccccugccccccguguaccugaccuucaccagagagagcagcugcgagaucaagcugaaguggagcaucccccugggccccauccccgccagaugcuucgacuacgagaucgagaucagagaggacgacaccacccuggugaccgccaccguggagaacgagaccuacacccugaagaccaccaacgagaccagacagcugugcuucguggugagaagcaaggugaacaucuacugcagcgacgacggcaucuggagcgaguggagcgacaagcagugcugggagggcgaggaccugagcaagaagacccugcugagauucuggcugcccuucggcuucauccugauccuggugaucuucgugaccggccugcugcugagaaagcccaacaccuaccccaagaugauccccgaguucuucugcgacaccuga

SEQ ID NO: 2754 - RNA, 819 nt, Artificial Sequence
  AAA67527 variant
auggacagcuaccugcugauguggggccugcugaccuucaucauggugcccggcugccaggccgagcugugcgacgacgacccccccgagaucccccacgccaccuucaaggccauggccuacaaggagggcaccaugcugaacugcgagugcaagagaggcuucagaagaaucaagagcggcagccuguacaugcugugcaccggcaacagcagccacagcagcugggacaaccagugccagugcaccagcagcgccaccagaaacaccaccaagcaggugaccccccagcccgaggagcagaaggagagaaagaccaccgagaugcagagccccaugcagcccguggaccaggccagccugcccggccacugcagagagcccccccccugggagaacgaggccaccgagagaaucuaccacuucguggugggccagaugguguacuaccagugcgugcagggcuacagagcccugcacagaggccccgccgagagcgugugcaagaugacccacggcaagaccagauggacccagccccagcugaucugcaccggcgagauggagaccagccaguuccccggcgaggagaagccccaggccagccccgagggcagacccgagagcgagaccagcugccuggugaccaccaccgacuuccagauccagaccgagauggccgccaccauggagaccagcaucuucaccaccgaguaccagguggccguggccggcugcguguuccugcugaucagcgugcugcugcugagcggccugaccuggcagagaagacagagaaagagcagaagaaccaucuga

SEQ ID NO: 2755 - RNA, 1656 nt, Artificial Sequence
  AAA59143 variant
auggccgcccccgcccugagcuggagacugccccugcugauccugcugcugccccuggccaccagcugggccagcgccgccgugaacggcaccagccaguucaccugcuucuacaacagcagagccaacaucagcugcguguggagccaggacggcgcccugcaggacaccagcugccaggugcacgccuggcccgacagaagaagauggaaccagaccugcgagcugcugcccgugagccaggccagcugggccugcaaccugauccugggcgcccccgacagccagaagcugaccaccguggacaucgugacccugagagugcugugcagagagggcgugagauggagagugauggccauccaggacuucaagcccuucgagaaccugagacugauggcccccaucagccugcagguggugcacguggagacccacagaugcaacaucagcugggagaucagccaggccagccacuacuucgagagacaccuggaguucgaggccagaacccugagccccggccacaccugggaggaggccccccugcugacccugaagcagaagcaggaguggaucugccuggagacccugacccccgacacccaguacgaguuccaggugagagugaagccccugcagggcgaguucaccaccuggagccccuggagccagccccuggccuucagaaccaagcccgccgcccugggcaaggacaccauccccuggcugggccaccugcuggugggccugagcggcgccuucggcuucaucauccugguguaccugcugaucaacugcagaaacaccggccccuggcugaagaaggugcugaagugcaacacccccgaccccagcaaguucuucagccagcugagcagcgagcacggcggcgacgugcagaaguggcugagcagccccuuccccagcagcagcuucagccccggcggccuggcccccgagaucagcccccuggaggugcuggagagagacaaggugacccagcugcugcugcagcaggacaaggugcccgagcccgccagccugagcagcaaccacagccugaccagcugcuucaccaaccagggcuacuucuucuuccaccugcccgacgcccuggagaucgaggccugccagguguacuucaccuacgaccccuacagcgaggaggaccccgacgagggcguggccggcgcccccaccggcagcagcccccagccccugcagccccugagcggcgaggacgacgccuacugcaccuuccccagcagagacgaccugcugcuguucagccccagccugcugggcggccccagcccccccagcaccgcccccggcggcagcggcgccggcgaggagagaaugccccccagccugcaggagagagugcccagagacugggacccccagccccugggcccccccacccccggcgugcccgaccugguggacuuccagcccccccccgagcuggugcugagagaggccggcgaggaggugcccgacgccggccccagagagggcgugagcuuccccuggagcagaccccccggccagggcgaguucagagcccugaacgccagacugccccugaacaccgacgccuaccugagccugcaggagcugcagggccaggaccccacccaccugguguga

SEQ ID NO: 2756 - RNA, 1110 nt, Artificial Sequence
  AAA59145 variant
augcugaagcccagccugcccuucaccagccugcuguuccugcagcugccccugcugggcgugggccugaacaccaccauccugacccccaacggcaacgaggacaccaccgccgacuucuuccugaccaccaugcccaccgacagccugagcgugagcacccugccccugcccgaggugcagugcuucguguucaacguggaguacaugaacugcaccuggaacagcagcagcgagccccagcccaccaaccugacccugcacuacugguacaagaacagcgacaacgacaaggugcagaagugcagccacuaccuguucagcgaggagaucaccagcggcugccagcugcagaagaaggagauccaccuguaccagaccuucguggugcagcugcaggaccccagagagcccagaagacaggccacccagaugcugaagcugcagaaccuggugauccccugggcccccgagaaccugacccugcacaagcugagcgagagccagcuggagcugaacuggaacaacagauuccugaaccacugccuggagcaccuggugcaguacagaaccgacugggaccacagcuggaccgagcagagcguggacuacagacacaaguucagccugcccagcguggacggccagaagagauacaccuucagagugagaagcagauucaacccccugugcggcagcgcccagcacuggagcgaguggagccaccccauccacuggggcagcaacaccagcaaggagaaccccuuccuguucgcccuggaggccguggugaucagcgugggcagcaugggccugaucaucagccugcugugcguguacuucuggcuggagagaaccaugcccagaauccccacccugaagaaccuggaggaccuggugaccgaguaccacggcaacuucagcgccuggagcggcgugagcaagggccuggccgagagccugcagcccgacuacagcgagagacugugccuggugagcgagaucccccccaagggcggcgcccugggcgagggccccggcgccagccccugcaaccagcacagccccuacugggccccccccugcuacacccugaagcccgagaccuga

SEQ ID NO: 2757 - RNA, 405 nt, Artificial Sequence
  AAA74469 variant
augagaaugcugcugcaccugagccugcuggcccugggcgccgccuacguguacgccauccccaccgagauccccaccagcgcccuggugaaggagacccuggcccugcugagcacccacagaacccugcugaucgccaacgagacccugagaauccccgugcccgugcacaagaaccaccagcugugcaccgaggagaucuuccagggcaucggcacccuggagagccagaccgugcagggcggcaccguggagagacuguucaagaaccugagccugaucaagaaguacaucgacggccagaagaagaagugcggcgaggagagaagaagagugaaccaguuccuggacuaccugcaggaguuccugggcgugaugaacaccgaguggaucaucgagagcuga

SEQ ID NO: 2758 - RNA, 555 nt, Artificial Sequence
  AAH06487 variant
auggugagaaagcugaaguuccacgagcagaagcugcugaagcagguggacuuccugaacugggaggugaccgaccacaaccugcacgagcugagagugcugagaagauacagacugcagagaagagaggacuacaccagauacaaccagcugagcagagccgugagagagcuggccagaagacugagagaccugcccgagagagaccaguucagagugagagccagcgccgcccugcuggacaagcuguacgcccugggccuggugcccaccagaggcagccuggagcugugcgacuucgugaccgccagcagcuucugcagaagaagacugcccaccgugcugcugaagcugagaauggcccagcaccugcaggccgccguggccuucguggagcagggccacgugagagugggccccgacguggugaccgaccccgccuuccuggugaccagaagcauggaggacuucgugaccuggguggacagcagcaagaucaagagacacgugcuggaguacaacgaggagagagacgacuucgaccuggaggccuga

SEQ ID NO: 2759 - RNA, 3150 nt, Artificial Sequence
  AAH08786 variant
augggcagcagaacccccgagagcccccugcacgccgugcagcugagauggggccccagaagaagacccccccugcugccccugcugcugcugcugcugccccccccccccagagugggcggcuucaaccuggacgccgaggcccccgccgugcugagcggcccccccggcagcuucuucggcuucagcguggaguucuacagacccggcaccgacggcgugagcgugcuggugggcgcccccaaggccaacaccagccagcccggcgugcugcagggcggcgccguguaccugugccccuggggcgccagccccacccagugcacccccaucgaguucgacagcaagggcagcagacugcuggagagcagccugagcagcagcgagggcgaggagcccguggaguacaagagccugcagugguucggcgccaccgugagagcccacggcagcagcauccuggccugcgccccccuguacagcuggagaaccgagaaggagccccugagcgaccccgugggcaccugcuaccugagcaccgacaacuucaccagaauccuggaguacgcccccugcagaagcgacuucagcugggccgccggccagggcuacugccagggcggcuucagcgccgaguucaccaagaccggcagaguggugcugggcggccccggcagcuacuucuggcagggccagauccugagcgccacccaggagcagaucgccgagagcuacuaccccgaguaccugaucaaccuggugcagggccagcugcagaccagacaggccagcagcaucuacgacgacagcuaccugggcuacagcguggccgugggcgaguucagcggcgacgacaccgaggacuucguggccggcgugcccaagggcaaccugaccuacggcuacgugaccauccugaacggcagcgacaucagaagccuguacaacuucagcggcgagcagauggccagcuacuucggcuacgccguggccgccaccgacgugaacggcgacggccuggacgaccugcuggugggcgccccccugcugauggacagaacccccgacggcagaccccaggaggugggcagaguguacguguaccugcagcaccccgccggcaucgagcccacccccacccugacccugaccggccacgacgaguucggcagauucggcagcagccugaccccccugggcgaccuggaccaggacggcuacaacgacguggccaucggcgcccccuucggcggcgagacccagcagggcgugguguucguguuccccggcggccccggcggccugggcagcaagcccagccaggugcugcagccccugugggccgccagccacacccccgacuucuucggcagcgcccugagaggcggcagagaccuggacggcaacggcuaccccgaccugaucgugggcagcuucggcguggacaaggccgugguguacagaggcagacccaucgugagcgccagcgccagccugaccaucuuccccgccauguucaaccccgaggagagaagcugcagccuggagggcaaccccguggccugcaucaaccugagcuucugccugaacgccagcggcaagcacguggccgacagcaucggcuucaccguggagcugcagcuggacuggcagaagcagaagggcggcgugagaagagcccuguuccuggccagcagacaggccacccugacccagacccugcugauccagaacggcgccagagaggacugcagagagaugaagaucuaccugagaaacgagagcgaguucagagacaagcugagccccauccacaucgcccugaacuucagccuggacccccaggcccccguggacagccacggccugagacccgcccugcacuaccagagcaagagcagaaucgaggacaaggcccagauccugcuggacugcggcgaggacaacaucugcgugcccgaccugcagcuggagguguucggcgagcagaaccacguguaccugggcgacaagaacgcccugaaccugaccuuccacgcccagaacgugggcgagggcggcgccuacgaggccgagcugagagugaccgccccccccgaggccgaguacagcggccuggugagacaccccggcaacuucagcagccugagcugcgacuacuucgccgugaaccagagcagacugcuggugugcgaccugggcaaccccaugaaggccggcgccagccuguggggcggccugagauucaccgugccccaccugagagacaccaagaagaccauccaguucgacuuccagauccugagcaagaaccugaacaacagccagagcgacguggugagcuucagacugagcguggaggcccaggcccaggugacccugaacggcgugagcaagcccgaggccgugcuguuccccgugagcgacuggcaccccagagaccagccccagaaggaggaggaccugggccccgccgugcaccacguguacgagcugaucaaccagggccccagcagcaucagccagggcgugcuggagcugagcugcccccaggcccuggagggccagcagcugcuguacgugaccagagugaccggccugaacugcaccaccaaccaccccaucaaccccaagggccuggagcuggaccccgagggcagccugcaccaccagcagaagagagaggcccccagcagaagcagcgccagcagcggcccccagauccugaagugccccgaggccgagugcuucagacugagaugcgagcugggcccccugcaccagcaggagagccagagccugcagcugcacuucagagugugggccaagaccuuccugcagagagagcaccagcccuucagccugcagugcgaggccguguacaaggcccugaagaugcccuacagaauccugcccagacagcugccccagaaggagagacagguggccaccgccgugcaguggaccaaggccgagggcagcuacggcgugccccuguggaucaucauccuggccauccuguucggccugcugcugcugggccugcugaucuacauccuguacaagcugggcuucuucaagagaagccugcccuacggcaccgccauggagaaggcccagcugaagccccccgccaccagcgacgccuga

SEQ ID NO: 2760 - RNA, 2397 nt, Artificial Sequence
  AAH20057 variant
augaaccugcagcccaucuucuggaucggccugaucagcagcgugugcugcguguucgcccagaccgacgagaacagaugccugaaggccaacgccaagagcugcggcgagugcauccaggccggccccaacugcggcuggugcaccaacagcaccuuccugcaggagggcaugcccaccagcgccagaugcgacgaccuggaggcccugaagaagaagggcugcccccccgacgacaucgagaaccccagaggcagcaaggacaucaagaagaacaagaacgugaccaacagaagcaagggcaccgccgagaagcugaagcccgaggacaucacccagauccagccccagcagcuggugcugagacugagaagcggcgagccccagaccuucacccugaaguucaagagagccgaggacuaccccaucgaccuguacuaccugauggaccugagcuacagcaugaaggacgaccuggagaacgugaagagccugggcaccgaccugaugaacgagaugagaagaaucaccagcgacuucagaaucggcuucggcagcuucguggagaagaccgugaugcccuacaucagcaccacccccgccaagcugagaaaccccugcaccagcgagcagaacugcaccagccccuucagcuacaagaacgugcugagccugaccaacaagggcgagguguucaacgagcuggugggcaagcagagaaucagcggcaaccuggacagccccgagggcggcuucgacgccaucaugcagguggccgugugcggcagccugaucggcuggagaaacgugaccagacugcugguguucagcaccgacgccggcuuccacuucgccggcgacggcaagcugggcggcaucgugcugcccaacgacggccagugccaccuggagaacaacauguacaccaugagccacuacuacgacuaccccagcaucgcccaccuggugcagaagcugagcgagaacaacauccagaccaucuucgccgugaccgaggaguuccagcccguguacaaggagcugaagaaccugauccccaagagcgccgugggcacccugagcgccaacagcagcaacgugauccagcugaucaucgacgccuacaacagccugagcagcgaggugauccuggagaacggcaagcugagcgagggcgugaccaucagcuacaagagcuacugcaagaacggcgugaacggcaccggcgagaacggcagaaagugcagcaacaucagcaucggcgacgaggugcaguucgagaucagcaucaccagcaacaagugccccaagaaggacagcgacagcuucaagaucagaccccugggcuucaccgaggagguggaggugauccugcaguacaucugcgagugcgagugccagagcgagggcauccccgagagccccaagugccacgagggcaacggcaccuucgagugcggcgccugcagaugcaacgagggcagagugggcagacacugcgagugcagcaccgacgaggugaacagcgaggacauggacgccuacugcagaaaggagaacagcagcgagaucugcagcaacaacggcgagugcgugugcggccagugcgugugcagaaagagagacaacaccaacgagaucuacagcggcaaguucugcgagugcgacaacuucaacugcgacagaagcaacggccugaucugcggcggcaacggcgugugcaagugcagagugugcgagugcaaccccaacuacaccggcagcgccugcgacugcagccuggacaccagcaccugcgaggccagcaacggccagaucugcaacggcagaggcaucugcgagugcggcgugugcaagugcaccgaccccaaguuccagggccagaccugcgagaugugccagaccugccugggcgugugcgccgagcacaaggagugcgugcagugcagagccuucaacaagggcgagaagaaggacaccugcacccaggagugcagcuacuucaacaucaccaagguggagagcagagacaagcugccccagcccgugcagcccgaccccgugagccacugcaaggagaaggacguggacgacugcugguucuacuucaccuacagcgugaacggcaacaacgaggugauggugcacgugguggagaaccccgagugccccaccggccccgacaucauccccaucguggccggcgugguggccggcaucgugcugaucggccuggcccugcugcugaucuggaagcugcugaugaucauccacgacagaagagaguucgccaaguucgagaaggagaagaugaacgccaagugggacaccggcgagaaccccaucuacaagagcgccgugaccaccguggugaaccccaaguacgagggcaaguga

SEQ ID NO: 2761 - RNA, 2367 nt, Artificial Sequence
  AAA36122 variant
augggcaucgagcugcugugccuguucuuccuguuccugggcagaaacgaccacgugcagggcggcugcgcccugggcggcgccgagaccugcgaggacugccugcugaucggcccccagugcgccuggugcgcccaggagaacuucacccaccccagcggcgugggcgagagaugcgacacccccgccaaccugcuggccaagggcugccagcugaacuucaucgagaaccccgugagccagguggagauccugaagaacaagccccugagcgugggcagacagaagaacagcagcgacaucgugcagaucgccccccagagccugauccugaagcugagacccggcggcgcccagacccugcaggugcacgugagacagaccgaggacuaccccguggaccuguacuaccugauggaccugagcgccagcauggacgacgaccugaacaccaucaaggagcugggcagcagacugagcaaggagaugagcaagcugaccagcaacuucagacugggcuucggcagcuucguggagaagcccgugagccccuucgugaagaccacccccgaggagaucgccaaccccugcagcagcauccccuacuucugccugcccaccuucggcuucaagcacauccugccccugaccaacgacgccgagagauucaacgagaucgugaagaaccagaagaucagcgccaacaucgacacccccgagggcggcuucgacgccaucaugcaggccgccgugugcaaggagaagaucggcuggagaaacgacagccugcaccugcugguguucgugagcgacgccgacagccacuucggcauggacagcaagcuggccggcaucgugauccccaacgacggccugugccaccuggacagcaagaacgaguacagcaugagcaccgugcuggaguaccccaccaucggccagcugaucgacaagcuggugcagaacaacgugcugcugaucuucgccgugacccaggagcaggugcaccuguacgagaacuacgccaagcugauccccggcgccaccgugggccugcugcagaaggacagcggcaacauccugcagcugaucaucagcgccuacgaggagcugagaagcgagguggagcuggaggugcugggcgacaccgagggccugaaccugagcuucaccgccaucugcaacaacggcacccuguuccagcaccagaagaagugcagccacaugaaggugggcgacaccgccagcuucagcgugaccgugaacaucccccacugcgagagaagaagcagacacaucaucaucaagcccgugggccugggcgacgcccuggagcugcuggugagccccgagugcaacugcgacugccagaaggagguggaggugaacagcagcaagugccaccacggcaacggcagcuuccagugcggcgugugcgccugccaccccggccacaugggccccagaugcgagugcggcgaggacaugcugagcaccgacagcugcaaggaggcccccgaccaccccagcugcagcggcagaggcgacugcuacugcggccagugcaucugccaccugagccccuacggcaacaucuacggccccuacugccagugcgacaacuucagcugcgugagacacaagggccugcugugcggcggcaacggcgacugcgacugcggcgagugcgugugcagaagcggcuggaccggcgaguacugcaacugcaccaccagcaccgacagcugcgugagcgaggacggcgugcugugcagcggcagaggcgacugcgugugcggcaagugcgugugcaccaaccccggcgccagcggccccaccugcgagagaugccccaccugcggcgaccccugcaacagcaagagaagcugcaucgagugccaccugagcgccgccggccaggccagagaggagugcguggacaagugcaagcuggccggcgccaccaucagcgaggaggaggacuucagcaaggacggcagcgugagcugcagccugcagggcgagaacgagugccugaucaccuuccugaucaccaccgacaacgagggcaagaccaucauccacagcaucaacgagaaggacugccccaagccccccaacauccccaugaucaugcugggcgugagccuggccauccugcugaucggcguggugcugcugugcaucuggaagcugcuggugagcuuccacgacagaaaggagguggccaaguucgaggccgagagaagcaaggccaaguggcagaccggcaccaacccccuguacagaggcagcaccagcaccuucaagaacgugaccuacaagcacagagagaagcagaagguggaccugagcaccgacugcuga

SEQ ID NO: 2762 - RNA, 786 nt, Artificial Sequence
  EAW71937 variant
augugggaccuggugcugagcaucgcccugagcgugggcugcaccggcgccgugccccugauccagagcagaaucgugggcggcugggagugcgagaagcacagccagcccuggcagguggccguguacagccacggcugggcccacugcggcggcgugcuggugcacccccagugggugcugaccgccgcccacugccugaagaagaacagccagguguggcugggcagacacaaccuguucgagcccgaggacaccggccagagagugcccgugagccacagcuucccccacccccuguacaacaugagccugcugaagcaccagagccugagacccgacgaggacagcagccacgaccugaugcugcugagacugagcgagcccgccaagaucaccgacguggugaaggugcugggccugcccacccaggagcccgcccugggcaccaccugcuacgccagcggcuggggcagcaucgagcccgaggaguuccugagacccagaagccugcagugcgugagccugcaccugcugagcaacgacaugugcgccagagccuacagcgagaaggugaccgaguucaugcugugcgccggccuguggaccggcggcaaggacaccugcggcggcgacagcggcggcccccuggugugcaacggcgugcugcagggcaucaccagcuggggccccgagcccugcgcccugcccgagaagcccgccguguacaccaagguggugcacuacagaaaguggaucaaggacaccaucgccgccaaccccuga

SEQ ID NO: 2763 - RNA, 672 nt, Artificial Sequence
  EAW71938 variant
augugggaccuggugcugagcaucgcccugagcgugggcugcaccggcgccgugccccugauccagagcagaaucgugggcggcugggagugcgagaagcacagccagcccuggcagguggccguguacagccacggcugggcccacugcggcggcgugcuggugcacccccagugggugcugaccgccgcccacugccugaagaagaacagccagguguggcugggcagacacaaccuguucgagcccgaggacaccggccagagagugcccgugagccacagcuucccccacccccuguacaacaugagccugcugaagcaccagagccugagacccgacgaggacagcagccacgaccugaugcugcugagacugagcgagcccgccaagaucaccgacguggugaaggugcugggccugcccacccaggagcccgcccugggcaccaccugcuacgccagcggcuggggcagcaucgagcccgaggaguuccugagacccagaagccugcagugcgugagccugcaccugcugagcaacgacaugugcgccagagccuacagcgagaaggugaccgaguucaugcugugcgccggccuguggaccggcggcaaggacaccugcggcgugagccaccccuacagccagcaccuggagggcaagggcuga

SEQ ID NO: 2764 - RNA, 189 nt, Artificial Sequence
  BAF98781 variant
augagccugcugaagcaccagagccugagacccgacgaggacagcagccacgaccugaugcugcugagacugagcgagcccgccaagaucaccgacguggugaaggugcugggccugcccacccaggagcccgcccugggcaccaccugcuacgccagcggcuggggcagcaucgagcccgaggaguga

SEQ ID NO: 2765 - RNA, 735 nt, Artificial Sequence
  BAG62239 variant
augggcacccuguggggcugccccggcgccccccccgugggcgcccacagcugcccccugcccaaggaggugagcagaacccugggcagcggcgagggcauggccgugagccacagaaacaacagcggcaugcugccccccggcagccugcugagaaacagccagguguggcugggcagacacaaccuguucgagcccgaggacaccggcagaagagugcccgugagccacagcuucccccacccccuguacaacaugagccugcugaagcaccagagccugagacccgacgaggacagcagccacgaccugaugcugcugagacugagcgagcccgccaagaucaccgacguggugaaggugcugggccugcccacccaggagcccgcccugggcaccaccugcuacgccagcggcuggggcagcaucgagcccgaggaguuccugagacccagaagccugcagugcgugagccugcaccugcugagcaacgacaugugcgccagagccuacagcgagaaggugaccgaguucaugcugugcgccggccuguggaccggcggcaaggacaccugcggcggcgacagcggcggcccccuggugugcaacggcgugcugcagggcaucaccagcuggggccccgagcccugcgcccugcccgagaagcccgccguguacaccaagguggugcacuacagaaaguggaucaaggacaccaucgccgccaaccccuga

SEQ ID NO: 2766 - RNA, 786 nt, Artificial Sequence; identical to SEQ ID NO: 2762
  AAA74454 variant

SEQ ID NO: 2767 - RNA, 150 nt, Artificial Sequence
  AAR10469 variant
augugggaccuggugcugagcaucgcccugagcgugggcugcaccggcaucgccagaagcggcugggugggcaccaccugccugagccugaagacccaggccagaggcagccugagcgccaccgccagccacaccagaagcaccaucuga

SEQ ID NO: 2768 - RNA, 543 nt, Artificial Sequence
  AAR10468 variant
augugggaccuggugcugagcaucgcccugagcgugggcugcaccggcgccgugccccugauccagagcagaaucgugggcggcugggagugcgagaagcacagccagcccuggcagguggccguguacagccacggcugggcccacugcggcggcgugcuggugcacccccagugggugcugaccgccgcccacugccugaagaagaacagccagguguggcugggcagacacaaccuguucgagcccgaggacaccggccagagagugcccgugagccacagcuucccccacccccuguacaacaugagccugcugaagcaccagagccugagacccgacgaggacagcagccacgaccugaugcugcugagacugagcgagcccgccaagaucaccgacguggugaaggugcugggccugcccacccaggagcccgcccugggcaccaccugcuacgccagcggcuggggcagcaucgagcccgaggagugcacccccggccccgacggcguggccggcagccccgacgccuggguguga

SEQ ID NO: 2769 - RNA, 765 nt, Artificial Sequence
  EAW71943 variant
auggccaccgccggcaaccccuggggcugguuccugggcuaccugauccugggcguggccggcagccuggugagcggcagcugcagccagaucaucaacggcgaggacugcagcccccacagccagcccuggcaggccgcccuggugauggagaacgagcuguucugcagcggcgugcuggugcacccccagugggugcugagcgccgcccacugcuuccagaacagcuacaccaucggccugggccugcacagccuggaggccgaccaggagcccggcagccagaugguggaggccagccugagcgugagacaccccgaguacaacagaccccugcuggccaacgaccugaugcugaucaagcuggacgagagcgugagcgagagcgacaccaucagaagcaucagcaucgccagccagugccccaccgccggcaacagcugccuggugagcggcuggggccugcuggccaacggcagaaugcccaccgugcugcagugcgugaacgugagcguggugagcgaggaggugugcagcaagcuguacgacccccuguaccaccccagcauguucugcgccggcggcggccaggaccagaaggacagcugcaacggcgacagcggcggcccccugaucugcaacggcuaccugcagggccuggugagcuucggcaaggcccccugcggccaggugggcgugcccggcguguacaccaaccugugcaaguucaccgaguggaucgagaagaccgugcaggccagcuga

SEQ ID NO: 2770 - RNA, 228 nt, Artificial Sequence
  AAX30051 variant
auggccaccgccggcaaccccuggggcugguuccugggcuaccugauccugggcguggccggcagccuggugagcggcagcugcagccagaucaucaacggcgaggacugcagcccccacagccagcccuggcaggccgcccuggugauggagaacgagcuguucugcagcggcgugcuggugcacccccagugggugcugagcgccgcccacugcuuccagaaguga

SEQ ID NO: 2771 - RNA, 588 nt, Artificial Sequence
  AAL14782 variant
auggccaccgccggcaaccccuggggcugguuccugggcuaccugauccugggcguggccggcagccuggugagcggcagcugcagccagaucaucaacggcgaggacugcagcccccacagccagcccuggcaggccgcccuggugauggagaacgagcuguucugcagcggcgugcuggugcacccccagugggugcugagcgccgcccacugcuuccagaacagcuacaccaucggccugggccugcacagccuggaggccgaccaggagcccggcagccagaugguggaggccagccugagcgugagacaccccgaguacaacagaccccugcuggccaacgaccugaugcugaucaagcuggacgagagcgugagcgagagcgacaccaucagaagcaucagcaucgccagccagugccccaccgccggcaacagcugccuggugagcggcuggggccugcuggccaacggcgagcugaccggcgugugccugcccagcagcagaagaagcagcgcccagagcagaggccugacccagagcagcgccagccaggccgagugccugcccugcugcagcgccuga

SEQ ID NO: 2772 - RNA, 480 nt, Artificial Sequence
  AAL14781 variant
auggccaccgccggcaaccccuggggcugguuccugggcuaccugauccugggcguggccggcagccuggugagcggcagcugcagccagaucaucaacggcgaggacugcagcccccacagccagcccuggcaggccgcccuggugauggagaacgagcuguucugcagcggcgugcuggugcacccccagugggugcugagcgccgcccacugcuuccagaacagcuacaccaucggccugggccugcacagccuggaggccgaccaggagcccggcagccagaugguggaggccagccugagcgugagacaccccgaguacaacagaccccugcuggccaacgaccugaugcugaucaagcuggacgagagcgugagcgagagcgacaccaucagaagcaucagcaucgccagccagugccccaccgccggcaacagcugccuggugagcggcuggggccugcuggccaacggcuga

SEQ ID NO: 2773 - RNA, 765 nt, Artificial Sequence
  AAD21580 variant
auggccaccgccggcaaccccuggggcugguuccugggcuaccugauccugggcguggccggcagccuggugagcggcagcugcagccagaucaucaacggcgaggacugcagcccccacagccagcccuggcaggccgcccuggugauggagaacgagcuguucugcagcggcgugcuggugcacccccagugggugcugagcgccgcccacugcuuccagaacagcuacaccaucggccugggccugcacagccuggaggccgaccaggagcccggcagccagaugguggaggccagccugagcgugagacaccccgaguacaacagaccccugcuggccaacgaccugaugcugaucaagcuggacgagagcgugagcgagagcgacaccaucagaagcaucagcaucgccagccagugccccaccgccggcaacagcugccuggugagcggcuggggccugcuggccaacggcagaaugcccaccgugcugcagugcgugaacgugagcguggugagcgaggaggugugcagcaagcuguacgacccccuguaccaccccagcauguucugcgccggcggcggccacgaccagaaggacagcugcaacggcgacagcggcggcccccugaucugcaacggcuaccugcagggccuggugagcuucggcaaggcccccugcggccaggugggcgugcccggcguguacaccaaccugugcaaguucaccgaguggaucgagaagaccgugcaggccagcuga

SEQ ID NO: 2774 - RNA, 2673 nt, Artificial Sequence
  AAC83230 variant
augagccagggcauccugagcccccccgccggccugcugagcgacgacgacgugguggugagccccauguucgagagcaccgccgccgaccugggcagcguggugagaaagaaccugcugagcgacugcagcguggugagcaccagccuggaggacaagcagcaggugcccagcgaggacagcauggagaaggugaagguguaccugagagugagaccccugcugcccagcgagcuggagagacaggaggaccagggcugcgugagaaucgagaacguggagacccuggugcugcaggcccccaaggacagcuucgcccugaagagcaacgagagaggcaucggccaggccacccacagauucaccuucagccagaucuucggccccgaggugggccaggccagcuucuucaaccugaccgugaaggagauggugaaggacgugcugaagggccagaacuggcugaucuacaccuacggcgugaccaacagcggcaagacccacaccauccagggcaccaucaaggacggcggcauccugcccagaagccuggcccugaucuucaacagccugcagggccagcugcaccccacccccgaccugaagccccugcugagcaacgaggugaucuggcuggacagcaagcagaucagacaggaggagaugaagaagcugagccugcugaacggcggccugcaggaggaggagcugagcaccagccugaagagaagcguguacaucgagagcagaaucggcaccagcaccagcuucgacagcggcaucgccggccugagcagcaucagccagugcaccagcagcagccagcuggacgagaccagccacagaugggcccagcccgacaccgccccccugcccgugcccgccaacaucagauucagcaucuggaucagcuucuucgagaucuacaacgagcugcuguacgaccugcuggagccccccagccagcagagaaagagacagacccugagacugugcgaggaccagaacggcaaccccuacgugaaggaccugaacuggauccacgugcaggacgccgaggaggccuggaagcugcugaaggugggcagaaagaaccagagcuucgccagcacccaccugaaccagaacagcagcagaagccacagcaucuucagcaucagaauccugcaccugcagggcgagggcgacaucgugcccaagaucagcgagcugagccugugcgaccuggccggcagcgagagaugcaaggaccagaagagcggcgagagacugaaggaggccggcaacaucaacaccagccugcacacccugggcagaugcaucgccgcccugagacagaaccagcagaacagaagcaagcagaaccuggugcccuucagagacagcaagcugaccagaguguuccagggcuucuucaccggcagaggcagaagcugcaugaucgugaacgugaaccccugcgccagcaccuacgacgagacccugcacguggccaaguucagcgccaucgccagccagcuggugcacgccccccccaugcagcugggcuuccccagccugcacagcuucaucaaggagcacagccugcaggugagccccagccuggagaagggcgccaaggccgacaccggccuggacgacgacaucgagaacgaggccgacaucagcauguacggcaaggaggagcugcugcaggugguggaggccaugaagacccugcugcugaaggagagacaggagaagcugcagcuggagaugcaccugagagacgagaucugcaacgagaugguggagcagaugcagcagagagagcaguggugcagcgagcaccuggacacccagaaggagcugcuggaggagauguacgaggagaagcugaacauccugaaggagagccugaccagcuucuaccaggaggagauccaggagagagacgagaagaucgaggagcuggaggcccugcugcaggaggccagacagcagagcguggcccaccagcagagcggcagcgagcuggcccugagaagaagccagagacuggccgccagcgccagcacccagcagcugcaggaggugaaggccaagcugcagcagugcaaggccgagcugaacagcaccaccgaggagcugcacaaguaccagaagaugcuggagcccccccccagcgccaagcccuucaccaucgacguggacaagaagcuggaggagggccagaagaacaucagacugcugagaaccgagcugcagaagcugggcgagagccugcagagcgccgagagagccugcugccacagcaccggcgccggcaagcugagacaggcccugaccaccugcgacgacauccugaucaagcaggaccagacccuggccgagcugcagaacaacauggugcuggugaagcuggaccugagaaagaaggccgccugcaucgccgagcaguaccacaccgugcugaagcugcagggccaggugagcgccaagaagagacugggcaccaaccaggagaaccagcagcccaaccagcagccccccggcaagaagcccuuccugagaaaccugcugcccagaacccccaccugccagagcagcaccgacugcagccccuacgccagaauccugagaagcagaagaagcccccugcugaagagcggccccuucggcaagaaguacuga

SEQ ID NO: 2775 - RNA, 1113 nt, Artificial Sequence
  AAH34621 variant
auggccaucacccuggaggaggcccccuggcugggcuggcugcuggugaaggcccugaugagauucgccuucaugguggugaacaaccugguggccauccccagcuacaucugcuacgugaucauccugcagccccugagagugcuggacagcaagagauucugguacaucgagggcaucauguacaaguggcugcugggcaugguggccagcuggggcugguacgccggcuacaccgugauggaguggggcgaggacaucaaggccgugagcaaggacgaggccgugaugcuggugaaccaccaggccaccggcgacgugugcacccugaugaugugccugcaggacaagggccuggugguggcccagaugauguggcugauggaccacaucuucaaguacaccaacuucggcaucgugagccuggugcacggcgacuucuucaucagacagggcagaagcuacagagaccagcagcugcugcugcugaagaagcaccuggagaacaacuacagaagcagagacagaaaguggaucgugcuguuccccgagggcggcuuccugagaaagagaagagagaccagccaggccuucgccaagaagaacaaccugcccuuccugaccaacgugacccugcccagaagcggcgccaccaagaucauccugaacgcccugguggcccagcagaagaacggcagccccgccggcggcgacgccaaggagcuggacagcaagagcaagggccugcaguggaucaucgacaccaccaucgccuaccccaaggccgagcccaucgacauccagaccuggauccugggcuacagaaagcccaccgugacccacgugcacuacagaaucuuccccaucaaggacgugccccuggagaccgacgaccugaccaccuggcuguaccagagauucguggagaaggaggaccugcugagccacuucuacgagaccggcgccuucccccccagcaagggccacaaggaggccgugagcagagagaugacccugagcaaccuguggaucuuccugauccagagcuucgccuuccugagcggcuacaugugguacaacaucauccaguacuucuaccacugccuguucuga

SEQ ID NO: 2776 - RNA, 2178 nt, Artificial Sequence
  AAH14924 variant
auggccauggacagcagccugcaggccagacuguuccccggccuggccaucaagauccagagaagcaacggccugauccacagcgccaacgugagaaccgugaaccuggagaagagcugcgugagcguggagugggccgagggcggcgccaccaagggcaaggagaucgacuucgacgacguggccgccaucaaccccgagcugcugcagcugcugccccugcaccccaaggacaaccugccccugcaggagaacgugaccauccagaagcagaagagaagaagcgugaacagcaagauccccgcccccaaggagagccugagaagcagaagcaccagaaugagcaccgugagcgagcugagaaucaccgcccaggagaacgacauggagguggagcugcccgccgccgccaacagcagaaagcaguucagcgugccccccgcccccaccagacccagcugccccgccguggccgagaucccccugagaauggugagcgaggagauggaggagcaggugcacagcaucagaggcagcagcagcgccaaccccgugaacagcgugagaagaaagagcugccuggugaaggagguggagaagaugaagaacaagagagaggagaagaaggcccagaacagcgagaugagaaugaagagagcccaggaguacgacagcagcuuccccaacugggaguucgccagaaugaucaaggaguucagagccacccuggagugccacccccugaccaugaccgaccccaucgaggagcacagaaucugcgugugcgugagaaagagaccccugaacaagcaggagcuggccaagaaggagaucgacgugaucagcauccccagcaagugccugcugcuggugcacgagcccaagcugaagguggaccugaccaaguaccuggagaaccaggccuucugcuucgacuucgccuucgacgagaccgccagcaacgaggugguguacagauucaccgccagaccccuggugcagaccaucuucgagggcggcaaggccaccugcuucgccuacggccagaccggcagcggcaagacccacaccaugggcggcgaccugagcggcaaggcccagaacgccagcaagggcaucuacgccauggccagcagagacguguuccugcugaagaaccagcccugcuacagaaagcugggccuggagguguacgugaccuucuucgagaucuacaacggcaagcuguucgaccugcugaacaagaaggccaagcugagagugcuggaggacggcaagcagcaggugcagguggugggccugcaggagcaccuggugaacagcgccgacgacgugaucaagaugaucgacaugggcagcgccugcagaaccagcggccagaccuucgccaacagcaacagcagcagaagccacgccugcuuccagaucauccugagagccaagggcagaaugcacggcaaguucagccugguggaccuggccggcaacgagagaggcgccgacaccagcagcgccgacagacagaccagaauggagggcgccgagaucaacaagagccugcuggcccugaaggagugcaucagagcccugggccagaacaaggcccacacccccuucagagagagcaagcugacccaggugcugagagacagcuucaucggcgagaacagcagaaccugcaugaucgccaccaucagccccggcaucagcagcugcgaguacacccugaacacccugagauacgccgacagagugaaggagcugagcccccacagcggccccagcggcgagcagcugauccagauggagaccgaggagauggaggccugcagcaacggcgcccugauccccggcaaccugagcaaggaggaggaggagcugagcagccagaugagcagcuucaacgaggccaugacccagaucagagagcuggaggagaaggccauggaggagcugaaggagaucauccagcagggccccgacuggcuggagcugagcgagaugaccgagcagcccgacuacgaccuggagaccuucgugaacaaggccgagagcgcccuggcccagcaggccaagcacuucagcgcccugagagacgugaucaaggcccugagacuggccaugcagcuggaggagcaggccagcagacagaucagcagcaagaagagaccccaguga

SEQ ID NO: 2777 - RNA, 342 nt, Artificial Sequence
  AAH62223 variant
augaacuucuaccugcugcuggccagcagcauccugugcgcccugaucguguucuggaaguacagaagauuccagagaaacaccggcgagaugagcagcaacagcaccgcccuggcccuggugagacccagcagcagcggccugaucaacagcaacaccgacaacaaccuggccguguacgaccugagcagagacauccugaacaacuucccccacagcaucgccagacagaagagaauccuggugaaccugagcaugguggagaacaagcugguggagcuggagcacacccugcugagcaagggcuucagaggcgccagcccccacagaaagagcaccuga

SEQ ID NO: 2778 - RNA, 2583 nt, Artificial Sequence
  AAA56833 variant
augggccccuggggcuggaagcugagauggaccguggcccugcugcuggccgccgccggcaccgccgugggcgacagaugcgagagaaacgaguuccagugccaggacggcaagugcaucagcuacaagugggugugcgacggcagcgccgagugccaggacggcagcgacgagagccaggagaccugccugagcgugaccugcaagagcggcgacuucagcugcggcggcagagugaacagaugcaucccccaguucuggagaugcgacggccagguggacugcgacaacggcagcgacgagcagggcugcccccccaagaccugcagccaggacgaguucagaugccacgacggcaagugcaucagcagacaguucgugugcgacagcgacagagacugccuggacggcagcgacgaggccagcugccccgugcugaccugcggccccgccagcuuccagugcaacagcagcaccugcaucccccagcugugggccugcgacaacgaccccgacugcgaggacggcagcgacgaguggccccagagaugcagaggccuguacguguuccagggcgacagcagccccugcagcgccuucgaguuccacugccugagcggcgagugcauccacagcagcuggagaugcgacggcggccccgacugcaaggacaagagcgacgaggagaacugcgccguggccaccugcagacccgacgaguuccagugcagcgacggcaacugcauccacggcagcagacagugcgacagagaguacgacugcaaggacaugagcgacgaggugggcugcgugaacgugacccugugcgagggccccaacaaguucaagugccacagcggcgagugcaucacccuggacaaggugugcaacauggccagagacugcagagacuggagcgacgagcccaucaaggagugcggcaccaacgagugccuggacaacaacggcggcugcagccacgugugcaacgaccugaagaucggcuacgagugccugugccccgacggcuuccagcugguggcccagagaagaugcgaggacaucgacgagugccaggaccccgacaccugcagccagcugugcgugaaccuggagggcggcuacaagugccagugcgaggagggcuuccagcuggacccccacaccaaggccugcaaggccgugggcagcaucgccuaccuguucuucaccaacagacacgaggugagaaagaugacccuggacagaagcgaguacaccagccugauccccaaccugagaaacgugguggcccuggacaccgagguggccagcaacagaaucuacuggagcgaccugagccagagaaugaucugcagcacccagcuggacagagcccacggcgugagcagcuacgacaccgugaucagcagagacauccaggcccccgacggccuggccguggacuggauccacagcaacaucuacuggaccgacagcgugcugggcaccgugagcguggccgacaccaagggcgugaagagaaagacccuguucagagagaacggcagcaagcccagagccaucgugguggaccccgugcacggcuucauguacuggaccgacuggggcacccccgccaagaucaagaagggcggccugaacggcguggacaucuacagccuggugaccgagaacauccaguggcccaacggcaucacccuggaccugcugagcggcagacuguacuggguggacagcaagcugcacagcaucagcagcaucgacgugaacggcggcaacagaaagaccauccuggaggacgagaagagacuggcccaccccuucagccuggccguguucgaggacaagguguucuggaccgacaucaucaacgaggccaucuucagcgccaacagacugaccggcagcgacgugaaccugcuggccgagaaccugcugagccccgaggacauggugcuguuccacaaccugacccagcccagaggcgugaacuggugcgagagaaccacccugagcaacggcggcugccaguaccugugccugcccgccccccagaucaacccccacagccccaaguucaccugcgccugccccgacggcaugcugcuggccagagacaugagaagcugccugaccgaggccgaggccgccguggccacccaggagaccagcaccgugagacugaaggugagcagcaccgccgugagaacccagcacaccaccaccagacccgugcccgacaccagcagacugcccggcgccacccccggccugaccaccguggagaucgugaccaugagccaccaggcccugggcgacguggccggcagaggcaacgagaagaagcccagcagcgugagagcccugagcaucgugcugcccaucgugcugcugguguuccugugccugggcguguuccugcuguggaagaacuggagacugaagaacaucaacagcaucaacuucgacaaccccguguaccagaagaccaccgaggacgaggugcacaucugccacaaccaggacggcuacagcuaccccagcagacagauggugagccuggaggacgacguggccuga

SEQ ID NO: 2779 - RNA, 1302 nt, Artificial Sequence
  CAA70989 variant
augguguggaagguggccguguuccugagcguggcccugggcaucggcgccgugcccaucgacgaccccgaggacggcggcaagcacuggguggugaucguggccggcagcaacggcugguacaacuacagacaccaggccgacgccugccacgccuaccagaucauccacagaaacggcauccccgacgagcagaucguggugaugauguacgacgacaucgccuacagcgaggacaaccccacccccggcaucgugaucaacagacccaacggcaccgacguguaccagggcgugcccaaggacuacaccggcgaggacgugaccccccagaacuuccuggccgugcugagaggcgacgccgaggccgugaagggcaucggcagcggcaaggugcugaagagcggcccccaggaccacguguucaucuacuucaccgaccacggcagcaccggcauccugguguuccccaacgaggaccugcacgugaaggaccugaacgagaccauccacuacauguacaagcacaagauguacagaaagaugguguucuacaucgaggccugcgagagcggcagcaugaugaaccaccugcccgacaacaucaacguguacgccaccaccgccgccaaccccagagagagcagcuacgccugcuacuacgacgagaagagaagcaccuaccugggcgacugguacagcgugaacuggauggaggacagcgacguggaggaccugaccaaggagacccugcacaagcaguaccaccuggugaagagccacaccaacaccagccacgugaugcaguacggcaacaagaccaucagcaccaugaaggugaugcaguuccagggcaugaagagaaaggccagcagccccgugccccugccccccgugacccaccuggaccugacccccagccccgacgugccccugaccaucaugaagagaaagcugaugaacaccaacgaccuggaggagagcagacagcugaccgaggagauccagagacaccuggacgccagacaccugaucgagaagagcgugagaaagaucgugagccugcuggccgccagcgaggccgagguggagcagcugcugagcgagagagccccccugaccggccacagcugcuaccccgaggcccugcugcacuucagaacccacugcuucaacuggcacagccccaccuacgaguacgcccugagacaccuguacgugcuggugaaccugugcgagaagcccuacccccugcacagaaucaagcugagcauggaccacgugugccugggccacuacuga

SEQ ID NO: 2780 - RNA, 1797 nt, Artificial Sequence
  AAL36991 variant
augacccccaucgugaccgugcugaucugccugggccugagccugggccccagaacccacgugcagaccggcaccauccccaagcccacccugugggccgagcccgacagcgugaucacccagggcagccccgugacccugagcugccagggcagccuggaggcccaggaguacagacuguacagagagaagaagagcgccagcuggaucaccagaaucagacccgagcuggugaagaacggccaguuccacauccccagcaucaccugggagcacaccggcagauacggcugccaguacuacagcagagccagauggagcgagcugagcgacccccuggugcuggugaugaccggcgccuaccccaagcccacccugagcgcccagcccagccccguggugaccagcggcggcagagugacccugcagugcgagagccagguggccuucggcggcuucauccugugcaaggagggcgaggaggagcacccccagugccugaacagccagccccacgccagaggcagcagcagagccaucuucagcgugggccccgugagccccaacagaagauggagccacagaugcuacggcuacgaccugaacagccccuacguguggagcagccccagcgaccugcuggagcugcuggugcccggcgugagcaagaagcccagccugagcgugcagcccggccccgugguggcccccggcgagagccugacccugcagugcgugagcgacgugggcuacgacagauucgugcuguacaaggagggcgagagagaccugagacagcugcccggcagacagccccaggccggccugagccaggccaacuucacccugggccccgugagcagaagcuacggcggccaguacagaugcuacggcgcccacaaccugagcagcgagugcagcgcccccagcgacccccuggacauccugaucaccggccagaucagaggcacccccuucaucagcgugcagcccggccccaccguggccagcggcgagaacgugacccugcugugccagagcuggagacaguuccacaccuuccugcugaccaaggccggcgccgccgacgccccccugagacugagaagcauccacgaguaccccaaguaccaggccgaguuccccaugagccccgugaccagcgcccacgccggcaccuacagaugcuacggcagccugaacagcgaccccuaccugcugagccaccccagcgagccccuggagcugguggugagcggccccagcaugggcagcagccccccccccaccggccccaucagcacccccgccggccccgaggaccagccccugacccccaccggcagcgacccccagagcggccugggcagacaccugggcguggugaucggcauccugguggccguggugcugcugcugcugcugcugcugcugcuguuccugauccugagacacagaagacagggcaagcacuggaccagcacccagagaaaggccgacuuccagcaccccgccggcgccgugggccccgagcccaccgacagaggccugcaguggagaagcagccccgccgccgacgcccaggaggagaaccuguacgccgccgugaaggacacccagcccgaggacggcguggagauggacaccagagccgccgccagcgaggccccccaggacgugaccuacgcccagcugcacagccugacccugagaagaaaggccaccgagcccccccccagccaggagagagagccccccgccgagcccagcaucuacgccacccuggccauccacuga

SEQ ID NO: 2781 - RNA, 498 nt, Artificial Sequence
  CCDS6385.2 variant
auggcccugcuggcccugcugcuggugguggcccugcccagaguguggaccgacgccaaccugaccgccagacagagagaccccgaggacagccagagaaccgacgagggcgacaacagaguguggugccacgugugcgagagagagaacaccuucgagugccagaaccccagaagaugcaaguggaccgagcccuacugcgugaucgccgccgugaagaucuuccccagauucuucaugguggccaagcagugcagcgccggcugcgccgccauggagagacccaagcccgaggagaagagauuccugcuggaggagcccaugcccuucuucuaccugaagugcugcaagaucagauacugcaaccuggagggcccccccaucaacagcagcguguucaaggaguacgccggcagcaugggcgagagcugcggcggccuguggcuggccauccugcugcugcuggccagcaucgccgccggccugagccugagcuga

SEQ ID NO: 2782 - RNA, 375 nt, Artificial Sequence
  AAA68873 variant
augagccuggagcagaagagccagcacugcaagcccgaggagggccuggacacccaggaggaggcccugggccuggugggcgugcaggccgccaccaccgaggagcaggaggccgugagcagcagcagcccccuggugcccggcacccugggcgaggugcccgccgccggcagccccggcccccugaagagcccccagggcgccagcgccauccccaccgccaucgacuucacccuguggagacagagcaucaagggcagcagcaaccaggaggaggagggccccagcaccagccccgaccccgagagcguguucagagccgcccugagcaagaagguggccgaccugauccacuuccugcugcugaaguacuga

SEQ ID NO: 2783 - RNA, 957 nt, Artificial Sequence
  AAH02455 variant
augcugcugggccagaagagccagagauacaaggccgaggagggccugcaggcccagggcgaggcccccggccugauggacgugcagauccccaccgccgaggagcagaaggccgccagcagcagcagcacccugaucaugggcacccuggaggaggugaccgacagcggcagccccagccccccccagagccccgagggcgccagcagcagccugaccgugaccgacagcacccuguggagccagagcgacgagggcagcagcagcaacgaggaggagggccccagcaccagccccgaccccgcccaccuggagagccuguucagagaggcccuggacgagaagguggccgagcuggugagauuccugcugagaaaguaccagaucaaggagcccgugaccaaggccgagaugcuggagagcgugaucaagaacuacaagaaccacuuccccgacaucuucagcaaggccagcgagugcaugcaggugaucuucggcaucgacgugaaggagguggaccccgccggccacagcuacauccuggugaccugccugggccugagcuacgacggccugcugggcgacgaccagagcacccccaagaccggccugcugaucaucgugcugggcaugauccugauggagggcagcagagcccccgaggaggccaucugggaggcccugagcgugaugggccuguacgacggcagagagcacagcguguacuggaagcugagaaagcugcugacccaggagugggugcaggagaacuaccuggaguacagacaggcccccggcagcgaccccgugagauacgaguuccuguggggccccagagcccuggccgagaccagcuacgugaaggugcuggagcacguggugagagugaacgccagagugagaaucagcuaccccagccugcacgaggaggcccugggcgaggagaagggcguguga

SEQ ID NO: 2784 - RNA, 1290 nt, Artificial Sequence
  AAH04479 variant
auggagacccaguucagaagaggcggccugggcugcagccccgccagcaucaagagaaagaagaagagagaggacagcggcgacuucggccugcaggugagcaccauguucagcgaggacgacuuccagagcaccgagagagcccccuacggcccccagcugcaguggagccaggaccugcccagagugcagguguucagagagcaggccaaccuggaggacagaagccccagaagaacccagagaaucaccggcggcgagcaggugcuguggggccccaucacccagaucuuccccaccgugagacccgccgaccugaccagagugaucaugccccuggagcagagaagccagcacugcaagcccgaggagggccugcaggcccaggaggaggaccugggccuggugggcgcccaggcccugcaggccgaggagcaggaggccgccuucuucagcagcacccugaacgugggcacccuggaggagcugcccgccgccgagagccccagccccccccagagcccccaggaggagagcuucagccccaccgccauggacgccaucuucggcagccugagcgacgagggcagcggcagccaggagaaggagggccccagcaccagccccgaccugaucgaccccgagagcuucagccaggacauccugcacgacaagaucaucgaccuggugcaccugcugcugagaaaguacagagugaagggccugaucaccaaggccgagaugcugggcagcgugaucaagaacuacgaggacuacuuccccgagaucuucagagaggccagcgugugcaugcagcugcuguucggcaucgacgugaaggagguggaccccaccagccacagcuacgugcuggugaccagccugaaccugagcuacgacggcauccagugcaacgagcagagcaugcccaagagcggccugcugaucaucgugcugggcgugaucuucauggagggcaacugcauccccgaggaggugaugugggaggugcugagcaucaugggcguguacgccggcagagagcacuuccuguucggcgagcccaagagacugcugacccagaacugggugcaggagaaguaccugguguacagacaggugcccggcaccgaccccgccugcuacgaguuccuguggggccccagagcccacgccgagaccagcaagaugaaggugcuggaguacaucgccaacgccaacggcagagaccccaccagcuaccccagccuguacgaggacgcccugagagaggagggcgagggcguguga

SEQ ID NO: 2785 - RNA, 1110 nt, Artificial Sequence
  EAW99421 variant
augcccagagcccccaagagacagagaugcaugcccgaggaggaccugcagagccagagcgagacccagggccuggagggcgcccaggccccccuggccguggaggaggacgccagcagcagcaccagcaccagcagcagcuuccccagcagcuuccccagcagcagcagcagcagcagcagcagcugcuacccccugauccccagcacccccgaggaggugagcgccgacgacgagacccccaaccccccccagagcgcccagaucgccugcagcagccccagcgugguggccagccugccccuggaccagagcgacgagggcagcagcagccagaaggaggagagccccagcacccugcaggugcugcccgacagcgagagccugcccagaagcgagaucgacgagaaggugaccgaccuggugcaguuccugcuguucaaguaccagaugaaggagcccaucaccaaggccgagauccuggagagcgugaucaagaacuacgaggaccacuucccccugcuguucagcgaggccagcgagugcaugcugcugguguucggcaucgacgugaaggagguggaccccaccggccacagcuucgugcuggugaccagccugggccugaccuacgacggcaugcugagcgacgugcagagcaugcccaagaccggcauccugauccugauccugagcaucaucuucaucgagggcuacugcacccccgaggaggugaucugggaggcccugaacaugaugggccuguacgacggcauggagcaccugaucuacggcgagcccagaaagcugcugacccaggacugggugcaggagaacuaccuggaguacagacaggugcccggcagcgaccccgccagauacgaguuccuguggggccccagagcccacgccgagaucagaaagaugagccugcugaaguuccuggccaaggugaacggcagcgaccccagaagcuucccccugugguacgaggaggcccugaaggacgaggaggagagagcccaggacagaaucgccaccaccgacgacaccaccgccauggccagcgccagcagcagcgccaccggcagcuucagcuaccccgaguga

SEQ ID NO: 2786 - RNA, 945 nt, Artificial Sequence
  AAH03408 variant
augccccuggagcagagaagccagcacugcaagcccgaggagggccuggaggcccagggcgaggcccugggccuggugggcgcccaggcccccgccaccgaggagcaggagaccgccagcagcagcagcacccugguggaggugacccugagagaggugcccgccgccgagagccccagccccccccacagcccccagggcgccagcacccugcccaccaccaucaacuacacccuguggagccagagcgacgagggcagcagcaacgaggagcaggagggccccagcaccuuccccgaccuggagaccagcuuccagguggcccugagcagaaagauggccgagcuggugcacuuccugcugcugaaguacagagccagagagcccuucaccaaggccgagaugcugggcagcgugaucagaaacuuccaggacuucuuccccgugaucuucagcaaggccagcgaguaccugcagcugguguucggcaucgaggugguggagguggugagaaucggccaccuguacauccuggugaccugccugggccugagcuacgacggccugcugggcgacaaccagaucgugcccaagaccggccugcugaucaucgugcuggccaucaucgccaaggagggcgacugcgcccccgaggagaagaucugggaggagcugagcgugcuggaggccagcgacggcagagaggacagcguguucgcccaccccagaaagcugcugacccaggaccuggugcaggagaacuaccuggaguacagacaggugcccggcagcgaccccgccugcuacgaguuccuguggggccccagagcccugguggagaccagcuacgugaaggugcugcaccaccugcugaagaucagcggcggcccccacaucagcuaccccccccugcacgagugggccuucagagagggcgaggaguga

SEQ ID NO: 2787 - RNA, 930 nt, Artificial Sequence
  AAA03229 variant
augagccuggagcagagaagccugcacugcaagcccgaggaggcccuggaggcccagcaggaggcccugggccuggugugcgugcaggccgccaccagcagcagcagcccccuggugcugggcacccuggaggaggugcccaccgccggcagcaccgaccccccccagagcccccagggcgccagcgccuuccccaccaccaucaacuucaccagacagagacagcccagcgagggcagcagcagcagagaggaggagggccccagcaccagcugcauccuggagagccuguucagagccgugaucaccaagaagguggccgaccuggugggcuuccugcugcugaaguacagagccagagagcccgugaccaaggccgagaugcuggagagcgugaucaagaacuacaagcacugcuuccccgagaucuucggcaaggccagcgagagccugcagcugguguucggcaucgacgugaaggaggccgaccccaccggccacagcuacgugcuggugaccugccugggccugagcuacgacggccugcugggcgacaaccagaucaugcccaagaccggcuuccugaucaucgugcuggugaugaucgccauggagggcggccacgcccccgaggaggagaucugggaggagcugagcgugauggagguguacgacggcagagagcacagcgccuacggcgagcccagaaagcugcugacccaggaccuggugcaggagaaguaccuggaguacagacaggugcccgacagcgaccccgccagauacgaguuccuguggggccccagagcccuggccgagaccagcuacgugaaggugcuggaguacgugaucaaggugagcgccagagugagauucuucuuccccagccugagagaggccgcccugagagaggaggaggagggcguguga

SEQ ID NO: 2788 - RNA, 945 nt, Artificial Sequence
  AAA17729 variant
augccccuggagcagagaagccagcacugcaagcccgaggagggccuggaggccagaggcgaggcccugggccuggugggcgcccaggcccccgccaccgaggagcagcagaccgccagcagcagcagcacccugguggaggugacccugggcgaggugcccgccgccgacagccccagccccccccacagcccccagggcgccagcagcuucagcaccaccaucaacuacacccuguggagacagagcgacgagggcagcagcaaccaggaggaggagggccccagaauguuccccgaccuggagagcgaguuccaggccgccaucagcagaaagaugguggagcuggugcacuuccugcugcugaaguacagagccagagagcccgugaccaaggccgagaugcuggagagcgugcugagaaacugccaggacuucuuccccgugaucuucagcaaggccagcgaguaccugcagcugguguucggcaucgaggugguggagguggugcccaucagccaccuguacauccuggugaccugccugggccugagcuacgacggccugcugggcgacaaccaggugaugcccaagaccggccugcugaucaucgugcuggccaucaucgccaucgagggcgacugcgcccccgaggagaagaucugggaggagcugagcaugcuggagguguucgagggcagagaggacagcguguucgcccaccccagaaagcugcugaugcaggaccuggugcaggagaacuaccuggaguacagacaggugcccggcagcgaccccgccugcuacgaguuccuguggggccccagagcccugaucgagaccagcuacgugaaggugcugcaccacacccugaagaucggcggcgagccccacaucagcuaccccccccugcacgagagagcccugagagagggcgaggaguga

SEQ ID NO: 2789 - RNA, 945 nt, Artificial Sequence
  AAA17446 variant
augccccuggagcagagaagccagcacugcaagcccgaggagggccuggaggccagaggcgaggcccugggccuggugggcgcccaggcccccgccaccgaggagcaggaggccgccagcagcagcagcacccugguggaggugacccugggcgaggugcccgccgccgagagccccgaccccccccagagcccccagggcgccagcagccugcccaccaccaugaacuacccccuguggagccagagcuacgaggacagcagcaaccaggaggaggagggccccagcaccuuccccgaccuggagagcgaguuccaggccgcccugagcagaaagguggccgagcuggugcacuuccugcugcugaaguacagagccagagagcccgugaccaaggccgagaugcugggcagcguggugggcaacuggcaguacuucuuccccgugaucuucagcaaggccagcagcagccugcagcugguguucggcaucgagcugauggagguggaccccaucggccaccuguacaucuucgccaccugccugggccugagcuacgacggccugcugggcgacaaccagaucaugcccaaggccggccugcugaucaucgugcuggccaucaucgccagagagggcgacugcgcccccgaggagaagaucugggaggagcugagcgugcuggagguguucgagggcagagaggacagcauccugggcgaccccaagaagcugcugacccagcacuucgugcaggagaacuaccuggaguacagacaggugcccggcagcgaccccgccugcuacgaguuccuguggggccccagagcccugguggagaccagcuacgugaaggugcugcaccacauggugaagaucagcggcggcccccacaucagcuaccccccccugcacgagugggugcugagagagggcgaggaguga

SEQ ID NO: 2790 - RNA, 954 nt, Artificial Sequence
  EAW99410 variant
augagcagcgagcagaagagccagcacugcaagcccgaggagggcguggaggcccaggaggaggcccugggccuggugggcgcccaggcccccaccaccgaggagcaggaggccgccgugagcagcagcagcccccuggugcccggcacccuggaggaggugcccgccgccgagagcgccggccccccccagagcccccagggcgccagcgcccugcccaccaccaucagcuucaccugcuggagacagcccaacgagggcagcagcagccaggaggaggagggccccagcaccagccccgacgccgagagccuguucagagaggcccugagcaacaagguggacgagcuggcccacuuccugcugagaaaguacagagccaaggagcuggugaccaaggccgagaugcuggagagagugaucaagaacuacaagagaugcuuccccgugaucuucggcaaggccagcgagagccugaagaugaucuucggcaucgacgugaaggagguggaccccgccagcaacaccuacacccuggugaccugccugggccugagcuacgacggccugcugggcaacaaccagaucuuccccaagaccggccugcugaucaucgugcugggcaccaucgccauggagggcgacagcgccagcgaggaggagaucugggaggagcugggcgugaugggcguguacgacggcagagagcacaccguguacggcgagcccagaaagcugcugacccaggacugggugcaggagaacuaccuggaguacagacaggugcccggcagcaaccccgccagauacgaguuccuguggggccccagagcccuggccgagaccagcuacgugaaggugcuggagcacguggugagagugaacgccagagugagaaucgccuaccccagccugagagaggccgcccugcuggaggaggaggagggcguguga

SEQ ID NO: 2791 - RNA, 954 nt, Artificial Sequence; identical to SEQ ID NO: 2790
  AAA68871 variant

SEQ ID NO: 2792 - RNA, 954 nt, Artificial Sequence
  AAY27261 variant
augagcagcgagcagaagagccagcacugcaagcccgaggagggcguggaggcccaggaggaggcccugggccuggugggcgcccaggcccccaccaccgaggagcaggaggccgccgugagcagcagcagcccccuggugcccggcacccuggaggaggugcccgccgccgagagcgccggccccccccagagcccccagggcgccagcgcccugcccaccaccaucagcuucaccugcuggagacagcccaacgagggcagcagcagccaggaggaggagggccccagcaccagccccgacgccgagagccuguucagagaggcccugagcaacaagguggacgagcuggcccacuuccugcugagaaaguacagagccaaggagcuggugaccaaggccgagaugcuggagagagugaucaagaacuacaagagaugcuuccccgugaucuucggcaaggccagcgagagccugaagaugaucuucggcaucgacgugaaggagguggaccccaccagcaacaccuacacccuggugaccugccugggccugagcuacgacggccugcugggcaacaaccagaucuuccccaagaccggccugcugaucaucgugcugggcaccaucgccauggagggcgacagcgccagcgaggaggagaucugggaggagcugggcgugaugggcguguacgacggcagagagcacaccguguacggcgagcccagaaagcugcugacccaggacugggugcaggagaacuaccuggaguacagacaggugcccggcagcaaccccgccagauacgaguuccuguggggccccagagcccuggccgagaccagcuacgugaaggugcuggagcacguggugagagugaacgccagagugagaaucgccuaccccagccugagagaggccgcccugcuggaggaggaggagggcguguga

SEQ ID NO: 2793 - RNA, 945 nt, Artificial Sequence
  BAF82126 variant
augccccuggagcagagaagccagcacugcaagcccgaggagggccuggaggccagaggcgaggcccugggccuggugggcgcccaggcccccgccaccgaggagcaggaggccgccagcagcagcagcacccugguggaggugacccugggcgaggugcccgccgccgagagccccgaccccccccagagcccccagggcgccagcagccugcccaccaccaugaacuacccccuguggagccagagcuacgaggacagcagcaaccaggaggaggagggccccagcaccuuccccgaccuggagagcgaguuccaggccgcccugagcagaaagcuggccaagcuggugcacuuccugcugcugaaguacagagccagagagcccgugaccaaggccgagaugcugggcagcguggugggcaacuggcaguacuucuuccccgugaucuucagcaaggccagcgacagccugcagcugguguucggcaucgagcugauggagguggaccccaucggccacguguacaucuucgccaccugccugggccugagcuacgacggccugcugggcgacaaccagaucaugcccaagaccggcuuccugaucaucauccuggccaucaucgccaaggagggcgacugcgcccccgaggagaagaucugggaggagcugagcgugcuggagguguucgagggcagagaggacaucaucuucggcgaccccaagaagcugcugacccaguacuucgugcaggagaacuaccuggaguacagacaggugcccggcagcgaccccgccugcuacgaguuccuguggggccccagagcccugaucgagaccagcuacgugaaggugcugcaccacauggugaagaucagcggcggccccagaaucagcuacccccugcugcacgagugggcccugagagagggcgaggaguga

SEQ ID NO: 2794 - RNA, 945 nt, Artificial Sequence
  AAA19006 variant
augccccuggagcagagaagccagcacugcaagcccgaggagggccuggaggccagaggcgaggcccugggccuggugggcgcccaggcccccgccaccgaggagcaggaggccgccagcagcagcagcacccugguggaggugacccugggcgaggugcccgccgccgagagccccgaccccccccagagcccccagggcgccagcagccugcccaccaccaugaacuacccccuguggagccagagcuacgaggacagcagcaaccaggaggaggagggccccagcaccuuccccgaccuggagagcgaguuccaggccgcccugagcagaaagguggccaagcuggugcacuuccugcugcugaaguacagagccagagagcccgugaccaaggccgagaugcugggcagcguggugggcaacuggcaguacuucuuccccgugaucuucagcaaggccagcgacagccugcagcugguguucggcaucgagcugauggagguggaccccaucggccacguguacaucuucgccaccugccugggccugagcuacgacggccugcugggcgacaaccagaucaugcccaagaccggcuuccugaucaucauccuggccaucaucgccaaggagggcgacugcgcccccgaggagaagaucugggaggagcugagcgugcuggagguguucgagggcagagaggacagcaucuucggcgaccccaagaagcugcugacccaguacuucgugcaggagaacuaccuggaguacagacaggugcccggcagcgaccccgccugcuacgaguuccuguggggccccagagcccugaucgagaccagcuacgugaaggugcugcaccacauggugaagaucagcggcggccccagaaucagcuacccccugcugcacgagugggcccugagagagggcgaggaguga

SEQ ID NO: 2795 - RNA, 945 nt, Artificial Sequence
  CAG46567 variant
augccccuggagcagagaagccagcacugcaagcccgaggagggccuggaggccagaggcgaggcccugggccuggugggcgcccaggcccccgccaccgaggagcaggaggccgccagcagcagcagcacccugguggaggugacccugggcgaggugcccgccgccgagagccccgaccccccccagagcccccagggcgccagcagccugcccaccaccaugaacuacccccuguggagccagagcuacgaggacagcagcaaccaggaggaggagggccccagcaccuuccccgaccuggagagcgaguuccaggccgcccugagcagaaagguggccaagcuggugcacuuccugcugcugaaguacagagccagagagcccgugaccaaggccgagaugcugggcagcguggugggcaacuggcaguacuucuuccccgugaucuucagcaaggccagcgacagccugcagcugguguucggcaucgagcugauggagguggaccccaucggccacguguacaucuucgccaccugccugggccugagcuacgacggccugcugggcgacaaccagaucaugcccaagaccggcuuccugaucaucauccuggccaucaucgccaaggagggcgacugcgcccccgaggagaagaucugggaggagcugagcgugcuggagguguucgagggcagagaggacagcaucuucggcgaccccaagaagcugcugacccaguacuucgugcaggagaacuaccuggaguacagacaggugcccggcagcgaccccgccugcuacgaguuccuguggggccccagagcccugaucgagaccagcuacgugaaggugcugcaccacauggugaagaucagcggcggccccagaaucagcuacccccugcugcacgagugggccuucagagagggcgaggaguga

SEQ ID NO: 2796 - RNA, 948 nt, Artificial Sequence
  AAA68877 variant
augagccuggagcagagaagcccccacugcaagcccgacgaggaccuggaggcccagggcgaggaccugggccugaugggcgcccaggagcccaccggcgaggaggaggagaccaccagcagcagcgacagcaaggaggaggaggugagcgccgccggcagcagcagccccccccagagcccccagggcggcgccagcagcagcaucagcguguacuacacccuguggagccaguucgacgagggcagcagcagccaggaggaggaggagcccagcagcagcguggaccccgcccagcuggaguucauguuccaggaggcccugaagcugaagguggccgagcuggugcacuuccugcugcacaaguacagagugaaggagcccgugaccaaggccgagaugcuggagagcgugaucaagaacuacaagagauacuuccccgugaucuucggcaaggccagcgaguucaugcaggugaucuucggcaccgacgugaaggagguggaccccgccggccacagcuacauccuggugaccgcccugggccugagcugcgacagcaugcugggcgacggccacagcaugcccaaggccgcccugcugaucaucgugcugggcgugauccugaccaaggacaacugcgcccccgaggaggugaucugggaggcccugagcgugaugggcguguacgugggcaaggagcacauguucuacggcgagcccagaaagcugcugacccaggacugggugcaggagaacuaccuggaguacagacaggugcccggcagcgaccccgcccacuacgaguuccuguggggcagcaaggcccacgccgagaccagcuacgagaaggugaucaacuaccuggugaugcugaacgccagagagcccaucugcuaccccagccuguacgaggaggugcugggcgaggagcaggagggcguguga

SEQ ID NO: 2797 - RNA, 1044 nt, Artificial Sequence
  AAI01309 variant
augcccagaggccagaagagcaagcugagagccagagagaagagaagacaggccagaggcggccuggaggaccugaucgacgcccuggacauccuggaggaggaggaggagagcccccccagcgccagcgccugccugaaggacguguuccagagcagccuggacggcgccagcaacaacccccacggccugagagaggcccagagcaccagcaccagcgccaccgccgccagccacaccagacaccccgagggcgugaacgaccagauggaggagagacccaucugcacccaggaccuggaggccaccgacagcuuccccagaggccccguggacgagaaggugaucauccuggugcacuaccugcuguacaaguaccagaugaaggagcccaucaccaaggccgacaugcugagaaacgugacccagaugagcaagagccaguuccccgugauccugagcagagccagcgagcaccuggagcugaucuucggccuggaccugaaggagguggagcccaacaagcacaucuacgugcuggugaacaagcuggaccugggcugcgacgccaagcugagcgacgagaccggcgugcccaagaccggccugcugaugaccgugcugggcaucaucuucaccaacggcaacugcguggccgaggaggagguguggaagguguucaacaccaugggccuguacgacggcaucgagcacuucauguucggcgagcccagaaagcugcugaccaaggaccuggugaaggagaacuaccuggaguaccagcaggugcccaacagcgacccccccagauaccaguuccuguggggccccagagcccacgccgagaccagcaagaugaaggugcuggaguuccuggccaaggugaacgacaccgcccccagcgaguucagcaacugguacaccgaggcccugcaggacgaggaggagagagccagagccagaguggccgccaaggccagagugagcgccaccgccggcgccagaagcaaggugaagagcagcaagagcagccagcugcaguga

SEQ ID NO: 2798 - RNA, 975 nt, Artificial Sequence
  CCDS43927.1 variant
augagccaggaccaggagagccccagaugcacccacgaccagcaccugcagaccuucagcgagacccagagccuggagguggcccaggugagcaaggcccuggagaagacccugcugagcagcagccacccccuggugcccggcaagcugaaggaggcccccgccgccaaggccgagagcccccuggaggugccccagagcuucugcagcagcagcaucgccgugaccaccaccagcagcagcgagagcgacgaggccagcagcaaccaggaggaggaggacagccccagcagcagcgaggacaccagcgaccccagaaacgugcccgccgacgcccuggaccagaagguggccuuccuggugaacuucaugcugcacaagugccagaugaagaagcccaucaccaaggccgacaugcugaagaucaucaucaaggacgacgagagccacuucagcgagauccugcugagagccagcgagcaccuggagaugaucuucggccuggacgugguggagguggaccccaccacccacugcuacggccuguucaucaagcugggccugaccuacgacggcaugcugagcggcgagaagggcgugcccaagaccggccugcugaucaucgugcugggcgugaucuucaugaagggcaacagagccaccgaggaggaggugugggaggugcugaaccugaccggcguguacagcggcaagaagcacuucaucuucggcgagcccagaaugcugaucaccaaggacuucgugaaggagaaguaccuggaguaccagcagguggccaacagcgaccccgccagauacgaguuccuguggggccccagagccaaggccgagaccagcaagaugaaggugcuggaguucguggccaaggugcacggcagcuacccccacagcuuccccagccaguacgccgaggcccugaaggaggaggaggagagagccagagccagaaucuga

SEQ ID NO: 2799 - RNA, 1011 nt, Artificial Sequence
  CCDS59524.1 variant
augcccagaggccaggccagcaagagaagagccagagagaagagaagacaggccagaggcgaggaccagugccugggcggcgcccaggccaccgccgccgagaaggagaagcugcccagcagcagcagccccgccugccagagccccccccagagcuuccccaacgccggcaucccccaggagagccagagagccagcuaccccagcagccccgccagcgccgugagccugaccagcagcgacgagggcgccaagggccagaagggcgagagccccaacagcuuccacggccccagcagcagcgagagcaccggcagagaccugcugaacaccaagaccggcgagcuggugcaguuccugcugaacaaguacaucagaaaggagcccaucaccagagaggccaugcugaaggugaucaacagaaaguacaagcagcacuuccccgagauccugagaagaagcaccgagaacguggaggugguguucggccuguaccugaaggagauggaccccagcagacagagcuacgugcuggugggcaagcuggacuuccccaaccagggcagccugagcgacggcggcggcuucccccugagcggccugcugauggugcugcugagcaccaucuucaugcacggcaacagagccaccgaggaggagaugugggagugccugaacgcccugggcauguacaagggcagaaagcacuucaucuacggcgagccccaggagcuggugaccaaggaccuggugagagagggcuaccuggaguaccagcaggugcccagcagcgacccccccagauacgaguuccuguggggccccagagccagagccgagaccagcaagaugaaggugcuggaguucguggccaagcugaacgacaccguggccagcaccuacaagagcagauacgaggaggcccugagagaggaggaggagcaggccagagccagagccguggccagagacagcgccagagccagagccagcagaagcuuccagcccuga

SEQ ID NO: 2800 - RNA, 1044 nt, Artificial Sequence
  AAC23616 variant
augcccagaggccagaagagcaagcugagagccagagagaagagaagaaaggccagagaggagacccagggccugaaggugagacacgccaccgccgccgagaaggaggagugccccagcagcagccccgugcugggcgacacccccaccagcagccccgccgccggcaucccccagaagccccagggcgccccccccaccaccaccgccgccgccgccgugagcugcaccgagagcgacgagggcgccaagugccagggcgaggagaacgccagcuucagccaggccaccaccagcaccgagagcagcgugaaggaccccguggccugggaggccggcaugcugaugcacuucauccugagaaaguacaagaugagagagcccaucaugaaggccgacaugcugaaggugguggacgagaaguacaaggaccacuucaccgagauccugaacggcgccagcagaagacuggagcugguguucggccuggaccugaaggaggacaaccccagcagccacaccuacacccuggugagcaagcugaaccugaccaacgacggcaaccugagcaacgacugggacuuccccagaaacggccugcugaugccccugcugggcgugaucuuccugaagggcaacagcgccaccgaggaggagaucuggaaguucaugaacgugcugggcgccuacgacggcgaggagcaccugaucuacggcgagcccagaaaguucaucacccaggaccuggugcaggagaaguaccugaaguacgagcaggugcccaacagcgacccccccagauaccaguuccuguggggccccagagccuacgccgagaccaccaagaugaaggugcuggaguuccuggccaagaugaacggcgccacccccagagacuuccccagccacuacgaggaggcccugagagacgaggaggagagagcccaggugagaagcagcgugagagccagaagaagaaccaccgccaccaccuucagagccagaagcagagcccccuucagcagaagcagccaccccauguga

SEQ ID NO: 2801 - RNA, 960 nt, Artificial Sequence
  AAD10635 variant
augcccagaggccagaagagcaagcugagagccagagagaagagaagaaaggccagagacgagaccagaggccugaacgugccccaggugaccgaggccgaggaggaggaggcccccugcugcagcagcagcgugagcggcggcgccgccagcagcagccccgccgccggcaucccccaggagccccagagagcccccaccaccgccgccgccgccgccgccggcgugagcagcaccaagagcaagaagggcgccaagagccaccagggcgagaagaacgccagcagcagccaggccagcaccagcaccaagagccccagcgaggacccccugaccagaaagagcggcagccuggugcaguuccugcuguacaaguacaagaucaagaagagcgugaccaagggcgagaugcugaagaucgugggcaagagauucagagagcacuuccccgagauccugaagaaggccagcgagggccugagcgugguguucggccuggagcugaacaaggugaaccccaacggccacaccuacaccuucaucgacaagguggaccugaccgacgaggagagccugcugagcagcugggacuuccccagaagaaagcugcugaugccccugcugggcgugaucuuccugaacggcaacagcgccaccgaggaggagaucugggaguuccugaacaugcugggcguguacgacggcgaggagcacagcguguucggcgagcccuggaagcugaucaccaaggaccuggugcaggagaaguaccuggaguacaagcaggugcccagcagcgacccccccagauuccaguuccuguggggccccagagccuacgccgagaccagcaagaugaaggugcuggaguuccuggccaaggugaacggcaccacccccugcgccuuccccacccacuacgaggaggcccugaaggacgaggagaaggccggcguguga

SEQ ID NO: 2802 - RNA, 1041 nt, Artificial Sequence
  AAD10636 variant
augcccagaggccagaagagcacccugcacgccagagagaagagacagcagaccagaggccagacccaggaccaccagggcgcccagaucaccgccaccaacaagaagaaggugagcuucagcagcccccugauccugggcgccaccauccagaagaagagcgccggcagaagcagaagcgcccugaagaagccccagagagcccugagcaccaccaccagcguggacgugagcuacaagaagagcuacaagggcgccaacagcaagaucgagaagaagcagagcuucagccagggccugagcagcaccgugcagagcagaaccgacccccugaucaugaagaccaacaugcuggugcaguuccugauggagauguacaagaugaagaagcccaucaugaaggccgacaugcugaagaucgugcagaagagccacaagaacugcuuccccgagauccugaagaaggccagcuucaacauggaggugguguucggcguggaccugaagaagguggacagcaccaaggacagcuacgugcuggugagcaagauggaccugcccaacaacggcaccgugaccagaggcagaggcuuccccaagaccggccugcugcugaaccugcugggcgugaucuucaugaagggcaacugcgccaccgaggagaagaucugggaguuccugaacaagaugagaaucuacgacggcaagaagcacuucaucuucggcgagcccagaaagcugaucacccaggaccuggugaagcugaaguaccuggaguacagacaggugcccaacagcaaccccgccagauacgaguuccuguggggccccagagcccacgccgagaccagcaagaugaaggugcuggaguucugggccaaggugaacaagaccgugcccagcgccuuccaguucugguacgaggaggcccugagagacgaggaggagagagugcaggccgccgccaugcugaacgacggcagcagcgccaugggcagaaagugcagcaaggccaaggccagcagcagcagccacgccuga

SEQ ID NO: 2803 - RNA, 1041 nt, Artificial Sequence
  AAC23619 variant
augcccagaggccagaagagcaagcugagagccagagagaagagacagagaaccagaggccagacccaggaccugaaggugggccagcccaccgccgccgagaaggaggagagccccagcagcagcagcagcgugcugagagacaccgccagcagcagccuggccuucggcaucccccaggagccccagagagagccccccaccaccagcgccgccgccgccaugagcugcaccggcagcgacaagggcgacgagagccaggacgaggagaacgccagcagcagccaggccagcaccagcaccgagagaagccugaaggacagccugaccagaaagaccaagaugcuggugcaguuccugcuguacaaguacaagaugaaggagcccaccaccaaggccgagaugcugaagaucaucagcaagaaguacaaggagcacuuccccgagaucuucagaaaggugagccagagaaccgagcugguguucggccuggcccugaaggaggugaaccccaccacccacagcuacauccuggugagcaugcugggccccaacgacggcaaccagagcagcgccuggacccugcccagaaacggccugcugaugccccugcugagcgugaucuuccugaacggcaacugcgccagagaggaggagaucugggaguuccugaacaugcugggcaucuacgacggcaagagacaccugaucuucggcgagcccagaaagcugaucacccaggaccuggugcaggagaaguaccuggaguaccagcaggugcccaacagcgacccccccagauaccaguuccuguggggccccagagcccacgccgagaccagcaagaugaaggugcuggaguuccuggccaaggugaacgacaccacccccaacaacuucccccugcuguacgaggaggcccugagagacgaggaggagagagccggcgccagacccagaguggccgccagaagaggcaccaccgccaugaccagcgccuacagcagagccaccagcagcagcagcagccagcccauguga

SEQ ID NO: 2804 - RNA, 828 nt, Artificial Sequence
  CCDS65233.1 variant
augaccagcgccggcguguucaacgccggcagcgacgagagagccaacagcagagacgaggaguaccccugcagcagcgaggugagccccagcaccgagagcagcugcagcaacuucaucaacaucaaggugggccugcuggagcaguuccugcuguacaaguucaagaugaagcagagaauccugaaggaggacaugcugaagaucgugaaccccagauaccagaaccaguucgccgagauccacagaagagccagcgagcacaucgaggugguguucgccguggaccugaaggaggugaaccccaccugccaccuguacgaccuggugagcaagcugaagcugcccaacaacggcagaauccacgugggcaaggugcugcccaagaccggccugcugaugaccuuccugguggugaucuuccugaagggcaacugcgccaacaaggaggacaccuggaaguuccuggacaugaugcagaucuacgacggcaagaaguacuacaucuacggcgagcccagaaagcugaucacccaggacuucgugagacugaccuaccuggaguaccaccaggugcccugcagcuaccccgcccacuaccaguuccuguggggccccagagccuacaccgagaccagcaagaugaaggugcuggaguaccuggccaaggugaacgacaucgcccccggcgccuucagcagccaguacgaggaggcccugcaggacgaggaggagagccccagccagagaugcagcagaaacuggcacuacugcagcggccaggacugccugagagccaaguucagcagcuucagccagcccuacuga

SEQ ID NO: 2805 - RNA, 1224 nt, Artificial Sequence
  AAH67286 variant
augcccagaggccacaagagcaagcugagaaccugcgagaagagacaggagaccaacggccagccccagggccugaccggcccccaggccaccgccgagaagcaggaggagagccacagcagcagcagcagcagcagagccugccugggcgacugcagaagaagcagcgacgccagcaucccccaggagagccagggcgugagccccaccggcagccccgacgccguggugagcuacagcaagagcgacguggccgccaacggccaggacgagaagagccccagcaccagcagagacgccagcgugccccaggagagccagggcgccagccccaccggcagccccgacgccggcgugagcggcagcaaguacgacguggccgccaacggccaggacgagaagagccccagcaccagccacgacgugagcgugccccaggagagccagggcgccagccccaccggcagccccgacgccggcgugagcggcagcaaguacgacguggccgccgagggcgaggacgaggagagcgugagcgccagccagaaggccaucaucuucaagagacugagcaaggacgccgugaagaagaaggccugcacccuggcccaguuccugcagaagaaguucgagaagaaggagagcauccugaaggccgacaugcugaagugcgugagaagagaguacaagcccuacuucccccagauccugaacagaaccagccagcaccuggugguggccuucggcguggagcugaaggagauggacagcagcggcgagagcuacacccuggugagcaagcugggccugcccagcgagggcauccugagcggcgacaacgcccugcccaagagcggccugcugaugagccugcugguggugaucuucaugaacggcaacugcgccaccgaggaggaggugugggaguuccugggccugcugggcaucuacgacggcauccugcacagcaucuacggcgacgccagaaagaucaucaccgaggaccuggugcaggacaaguacgugguguacagacaggugugcaacagcgacccccccugcuacgaguuccuguggggccccagagccuacgccgagaccaccaagaugagagugcugagagugcuggccgacagcagcaacaccagccccggccuguacccccaccuguacgaggacgcccugaucgacgagguggagagagcccugagacugagagccuga

SEQ ID NO: 2806 - RNA, 3429 nt, Artificial Sequence
  CCDS35417.1 variant
augggcgacaaggacaugcccaccgccggcaugcccagccugcugcagagcagcagcgagagcccccagagcugccccgagggcgaggacagccagagcccccugcagaucccccagagcagccccgagagcgacgacacccuguacccccugcagagcccccagagcagaagcgagggcgaggacagcagcgacccccugcagagaccccccgagggcaaggacagccagagcccccugcagaucccccagagcagccccgagggcgacgacacccagagcccccugcagaacagccagagcagccccgagggcaaggacagccugagcccccuggagaucagccagagcccccccgagggcgaggacgugcagagcccccugcagaaccccgccagcagcuucuucagcagcgcccugcugagcaucuuccagagcagccccgagagcacccagagccccuucgagggcuucccccagagcgugcugcagauccccgugagcgccgccagcagcagcacccuggugagcaucuuccagagcagccccgagagcacccagagccccuucgagggcuucccccagagcccccugcagauccccgugagcagaagcuucagcagcacccugcugagcaucuuccagagcagccccgagagaacccagagcaccuucgagggcuucgcccagagcccccugcagauccccgugagccccagcagcagcagcacccugcugagccuguuccagagcuucagcgagagaacccagagcaccuucgagggcuucgcccagagcagccugcagauccccgugagccccagcuucagcagcacccuggugagccuguuccagagcagccccgagagaacccagagcaccuucgagggcuucccccagagcccccugcagauccccgugagcagcagcagcagcagcacccugcugagccuguuccagagcagccccgagagaacccacagcaccuucgagggcuucccccagagccugcugcagauccccaugaccagcagcuucagcagcacccugcugagcaucuuccagagcagccccgagagcgcccagagcaccuucgagggcuucccccagagcccccugcagauccccggcagccccagcuucagcagcacccugcugagccuguuccagagcagccccgagagaacccacagcaccuucgagggcuucccccagagcccccugcagauccccaugaccagcagcuucagcagcacccugcugagcauccugcagagcagccccgagagcgcccagagcgccuucgagggcuucccccagagcccccugcagauccccgugagcagcagcuucagcuacacccugcugagccuguuccagagcagccccgagagaacccacagcaccuucgagggcuucccccagagcccccugcagauccccgugagcagcagcagcagcagcagcacccugcugagccuguuccagagcagccccgagugcacccagagcaccuucgagggcuucccccagagcccccugcagaucccccagagcccccccgagggcgagaacacccacagcccccugcagaucgugcccagccugcccgagugggaggacagccugagcccccacuacuucccccagagccccccccagggcgaggacagccugagcccccacuacuucccccagagccccccccagggcgaggacagccugagcccccacuacuucccccagagcccccagggcgaggacagccugagcccccacuacuucccccagagccccccccagggcgaggacagcaugagcccccuguacuucccccagagcccccugcagggcgaggaguuccagagcagccugcagagccccgugagcaucugcagcagcagcacccccagcagccugccccagagcuuccccgagagcagccagagcccccccgagggccccgugcagagcccccugcacagcccccagagcccccccgagggcaugcacagccagagcccccugcagagccccgagagcgcccccgagggcgaggacagccugagcccccugcagaucccccagagcccccuggagggcgaggacagccugagcagccugcacuucccccagagcccccccgagugggaggacagccugagcccccugcacuucccccaguuccccccccagggcgaggacuuccagagcagccugcagagccccgugagcaucugcagcagcagcaccagccugagccugccccagagcuuccccgagagcccccagagcccccccgagggccccgcccagagcccccugcagagacccgugagcagcuucuucagcuacacccuggccagccugcugcagagcagccacgagagcccccagagcccccccgagggccccgcccagagcccccugcagagccccgugagcagcuuccccagcagcaccagcagcagccugagccagagcagccccgugagcagcuuccccagcagcaccagcagcagccugagcaagagcagccccgagagcccccugcagagccccgugaucagcuucagcagcagcaccagccugagccccuucagcgaggagagcagcagccccguggacgaguacaccagcagcagcgacacccugcuggagagcgacagccugaccgacagcgagagccugaucgagagcgagccccuguucaccuacacccuggacgagaagguggacgagcuggccagauuccugcugcugaaguaccaggugaagcagcccaucaccaaggccgagaugcugaccaacgugaucagcagauacaccggcuacuuccccgugaucuucagaaaggccagagaguucaucgagauccuguucggcaucagccugagagagguggaccccgacgacagcuacguguucgugaacacccuggaccugaccagcgagggcugccugagcgacgagcagggcaugagccagaacagacugcugauccugauccugagcaucaucuucaucaagggcaccuacgccagcgaggaggugaucugggacgugcugagcggcaucggcgugagagccggcagagagcacuucgccuucggcgagcccagagagcugcugaccaaggugugggugcaggagcacuaccuggaguacagagaggugcccaacagcagcccccccagauacgaguuccuguggggccccagagcccacagcgaggugaucaagagaaaggugguggaguuccuggccaugcugaagaacaccgugcccaucaccuuccccagcagcuacaaggacgcccugaaggacguggaggagagagcccaggccaucaucgacaccaccgacgacagcaccgccaccgagagcgccagcagcagcgugaugagccccagcuucagcagcgaguga

SEQ ID NO: 2807 - RNA, 1122 nt, Artificial Sequence
  AAF07210 variant
augccccccgugcccggcgugcccuucagaaacguggacaacgacagccccaccagcguggagcuggaggacuggguggacgcccagcaccccaccgacgaggaggaggaggaggccagcagcgccagcagcacccuguaccugguguucagccccagcagcuucagcaccagcagcagccugauccugggcggccccgaggaggaggaggugcccagcggcgugauccccaaccugaccgagagcauccccagcagccccccccagggccccccccagggccccagccagagcccccugagcagcugcugcagcagcuucagcuggagcagcuucagcgaggagagcagcagccagaagggcgaggacaccggcaccugccagggccugcccgacagcgagagcagcuucaccuacacccuggacgagaagguggccgagcugguggaguuccugcugcugaaguacgaggccgaggagcccgugaccgaggccgagaugcugaugaucgugaucaaguacaaggacuacuuccccgugauccugaagagagccagagaguucauggagcugcuguucggccuggcccugaucgaggugggccccgaccacuucugcguguucgccaacaccgugggccugaccgacgagggcagcgacgacgagggcaugcccgagaacagccugcugaucaucauccugagcgugaucuucaucaagggcaacugcgccagcgaggaggugaucugggaggugcugaacgccgugggcguguacgccggcagagagcacuucguguacggcgagcccagagagcugcugaccaaggugugggugcagggccacuaccuggaguacagagaggugccccacagcagcccccccuacuacgaguuccuguggggccccagagcccacagcgagagcaucaagaagaaggugcuggaguuccuggccaagcugaacaacaccgugcccagcagcuuccccagcugguacaaggacgcccugaaggacguggaggagagagugcaggccaccaucgacaccgccgacgacgccaccgugauggccagcgagagccugagcgugaugagcagcaacgugagcuucagcgaguga

SEQ ID NO: 2808 - RNA, 1932 nt, Artificial Sequence
  AAM08355 variant
augcugcugcccugccacugggugcuggacgccaccuucagcgacggcagccugggccagugggugaagaacaccugcgccaccuacgcccugagccccguggugcugcccccccagccccagcccagaaagaaggccaccgacaaggacuacagcgccuuccaccugggccaccugagagaggugagacuguuccugagaggcggcaccagcgaccagagaauggacagccuggugcugugccccaccuacuucaagcuguggagaacccugagcggcagccccggccugcagcugagcgaccugcacuucggcagccagcccgagggcaaguucagccugagaagagccgugagcgugaagcagagagaggagccccaggacuggccccugaacgagaagagaacccuguggaaggacagcgaccugcccaccuggagaagaggcaccggcuacacccugagccugcccgccgugagccccggcaagagacuguggggcgagaaggccggcagccugcccgagagcgagccccuguucaccuacacccuggacgagaagguggacaagcuggugcaguuccugcugcugaaguaccaggccaaggagccccugaccagagccgagaugcagaugaacgugaucaacaccuacaccggcuacuuccccaugaucuucagaaaggccagagaguucaucgagauccuguucggcaucagccugaccgagguggaccccgaccacuucuacguguucgugaacacccuggaccugaccugcgagggcagccugagcgacgagcagggcaugccccagaacagacugcugauccugauccugagcgugaucuucaucaagggcaacugcgccagcgaggaggugaucugggaggugcugaacgccaucggccccuggagcgcccuggccggcuucgccgacgugcugagcagacuggcccugugggagagcgagggccccgaggccuucugcgaggagagcggccugagaagcgccgagggcagcgugcuggaccuggccaacccccagggccuggccggccacagacaggaggacggcagaagaggccugaccgaggccagcccccagcagaagaagggcggcgaggacgaggacaugcccgccgccggcaugcccccccugccccagagcccccccgagauccccccccagggcccccccaagaucagcccccagggccccccccagagccccccccagagcccccuggacagcugcagcagcccccugcuguggaccagacuggacgaggagagcagcagcgaggaggaggacaccgccaccuggcacgcccugcccgagagcgagagccugcccagauacgcccuggacgagaagguggccgagcuggugcaguuccugcugcugaaguaccagaccaaggagcccgugaccaaggccgagaugcugaccaccgugaucaagaaguacaaggacuacuuccccaugaucuucggcaaggcccacgaguucaucgagcugaucuucggcaucgcccugaccgacauggaccccgacaaccacagcuacuucuucgaggacacccuggaccugaccuacgagggcagccugaucgacgaccagggcaugcccaagaacugccugcugauccugauccugagcaugaucuucaucaagggcagcugcgugcccgaggaggugaucugggaggugcugagcgccaucggccccauccagagacccgccagagaggugcuggaguuccugagcaagcugagcagcaucauccccagcgccuuccccagcugguacauggacgcccugaaggacauggaggacagagcccaggccaucaucgacaccaccgacgacgccaccgccauggccagcgccagccccagcgugaugagcaccaacuucugccccgaguga

SEQ ID NO: 2809 - RNA, 2337 nt, Artificial Sequence
  AAG23757 variant
auggcccagaagauggacugcggcgccggccugcugggcuuccaggccgaggccagcguggaggacagcgcccugcugaugcagacccugauggaggccauccagaucagcgaggccccccccaccaaccaggccaccgccgccgccagcccccagagcagccagccccccaccgccaacgagauggccgacauccaggugagcgccgccgccgccagacccaagagcgccuucaaggugcagaacgccaccaccaagggccccaacggcguguacgacuucagccaggcccacaacgccaaggacgugcccaacacccagcccaaggccgccuucaagagccagaacgccacccccaagggccccaacgccgccuacgacuucagccaggccgccaccaccggcgagcuggccgccaacaagagcgagauggccuucaaggcccagaacgccaccaccaaggugggccccaacgccaccuacaacuucagccagagccugaacgccaacgaccuggccaacagcagacccaagacccccuucaaggccuggaacgacaccaccaaggcccccaccgccgacacccagacccagaacgugaaccaggccaagauggccaccagccaggccgacaucgagaccgaccccggcaucagcgagcccgacggcgccaccgcccagaccagcgccgacggcagccaggcccagaaccuggagagcagaaccaucaucagaggcaagagaaccagaaagaucaacaaccugaacguggaggagaacagcagcggcgaccagagaagagccccccuggccgccggcaccuggagaagcgcccccgugcccgugaccacccagaacccccccggcgccccccccaacgugcuguggcagaccccccuggccuggcagaaccccagcggcuggcagaaccagaccgccagacagaccccccccgccagacagagcccccccgccagacagaccccccccgccuggcagaaccccguggccuggcagaaccccgugaucuggcccaaccccgugaucuggcagaaccccgugaucuggcccaaccccaucguguggcccggccccgugguguggcccaacccccuggccuggcagaacccccccggcuggcagaccccccccggcuggcagaccccccccggcuggcagggcccccccgacuggcagggcccccccgacuggccccugccccccgacuggccccugccccccgacuggccccugcccaccgacuggccccugccccccgacuggauccccgccgacuggcccaucccccccgacuggcagaaccugagacccagccccaaccugagacccagccccaacagcagagccagccagaaccccggcgccgcccagcccagagacguggcccugcugcaggagagagccaacaagcuggugaaguaccugaugcugaaggacuacaccaaggugcccaucaagagaagcgagaugcugagagacaucaucagagaguacaccgacguguaccccgagaucaucgagagagccugcuucgugcuggagaagaaguucggcauccagcugaaggagaucgacaaggaggagcaccuguacauccugaucagcacccccgagagccuggccggcauccugggcaccaccaaggacacccccaagcugggccugcugcuggugauccugggcgugaucuucaugaacggcaacagagccagcgaggccgugcugugggaggcccugagaaagaugggccugagacccggcgugagacacccccugcugggcgaccugagaaagcugcugaccuacgaguucgugaagcagaaguaccuggacuacagaagagugcccaacagcaacccccccgaguacgaguuccuguggggccugagaagcuaccacgagaccagcaagaugaaggugcugagauucaucgccgaggugcagaagagagaccccagagacuggaccgcccaguucauggaggccgccgacgaggcccuggacgcccuggacgccgccgccgccgaggccgaggccagagccgaggccagaaccagaaugggcaucggcgacgaggccgugagcggccccuggagcugggacgacaucgaguucgagcugcugaccugggacgaggagggcgacuucggcgaccccuggagcagaauccccuucaccuucugggccagauaccaccagaacgccagaagcagauucccccagaccuucgccggccccaucaucggccccggcggcaccgccagcgccaacuucgccgccaacuucggcgccaucggcuucuucuggguggaguga

SEQ ID NO: 2810 - RNA, 1821 nt, Artificial Sequence
  AAD28598 variant
augagcgacaccagcgagagcggcgccggccugaccagauuccaggccgaggccagcgagaaggacagcagcagcaugaugcagacccugcugaccgugacccagaacguggaggugcccgagacccccaaggccagcaaggcccuggaggugagcgaggacgugaaggugagcaaggccagcggcgugagcaaggccaccgaggugagcaagacccccgaggccagagaggcccccgccacccaggccagcagcaccacccagcugaccgacacccaggugcuggccgccgagaacaagagccuggccgccgacaccaagaagcagaacgccgacccccaggccgugaccaugcccgccaccgagaccaagaaggugagccacguggccgacaccaaggugaacaccaaggcccaggagaccgaggccgcccccagccaggcccccgccgacgagcccgagcccgagagcgccgccgcccagagccaggagaaccaggacaccagacccaaggugaaggccaagaaggccagaaaggugaagcaccuggacggcgaggaggacggcagcagcgaccagagccaggccagcggcaccaccggcggcagaagagugagcaaggcccugauggccagcauggccagaagagccagcagaggccccaucgccuucugggccagaagagccagcagaaccagacuggccgccugggccagaagagcccugcugagccugagaagccccaaggccagaagaggcaaggccagaagaagagccgccaagcugcagagcagccaggagcccgaggcccccccccccagagacguggcccugcugcagggcagagccaacgaccuggugaaguaccugcuggccaaggaccagaccaagauccccaucaagagaagcgacaugcugaaggacaucaucaaggaguacaccgacguguaccccgagaucaucgagagagccggcuacagccuggagaagguguucggcauccagcugaaggagaucgacaagaacgaccaccuguacauccugcugagcacccuggagcccaccgacgccggcauccugggcaccaccaaggacagccccaagcugggccugcugauggugcugcugagcaucaucuucaugaacggcaacagaagcagcgaggccgugaucugggaggugcugagaaagcugggccugagacccggcauccaccacagccuguucggcgacgugaagaagcugaucaccgacgaguucgugaagcagaaguaccuggacuacgccagagugcccaacagcaacccccccgaguacgaguucuucuggggccugagaagcuacuacgagaccagcaagaugaaggugcugaaguucgccugcaaggugcagaagaaggaccccaaggagugggccgcccaguacagagaggccauggaggccgaccugaaggccgccgccgaggccgccgccgaggccaaggccagagccgagaucagagccagaaugggcaucggccugggcagcgagaacgccgccggccccugcaacugggacgaggccgacaucggccccugggccaaggccagaauccaggccggcgccgaggccaaggccaaggcccaggagagcggcagcgccagcaccggcgccagcaccagcaccaacaacagcgccagcgccagcgccagcaccagcggcggcuucagcgccggcgccagccugaccgccacccugaccuucggccuguucgccggccugggcggcgccggcgccagcaccagcggcagcagcggcgccugcggcuucagcuacaaguga

SEQ ID NO: 2811 - RNA, 2226 nt, Artificial Sequence
  AAH63838 variant
auggccgagggcagcuucagcgugcagagcgagagcuacagcguggaggacauggacgagggcagcgacgaggugggcgaggaggagaugguggagggcaacgacuacgaggaguucggcgccuucggcggcuacggcacccugaccagcuucgacauccacauccugagagccuucggcagccugggccccggccugagaauccugagcaacgagcccugggagcuggagaaccccgugcuggcccagacccugguggaggcccugcagcuggaccccgagacccuggccaacgagaccgccgccagagccgccaacguggccagagccgccgccagcaacagagccgccagagccgccgccgccgccgccagaaccgccuucagccaggugguggccagccacagaguggccaccccccaggugagcggcgaggacacccagcccaccaccuacgccgccgaggcccagggccccacccccgagcccccccuggccagcccccagaccagccagaugcuggugaccagcaagauggccgcccccgaggcccccgccaccagcgcccagagccagaccggcagccccgcccaggaggccgccaccgagggccccagcagcgccugcgccuucagccaggcccccugcgccagagagguggacgccaacagacccagcaccgccuuccugggccagaacgacguguucgacuucacccagcccgccggcgugagcggcauggccuuccccagacccaagagacccgcccccgcccaggaggccgccaccgagggccccagcgccgccagcggcgugccccagaccggccccggcagagagguggccgccaccagacccaagaccaccaagagcggcaaggcccuggccaagaccagauggguggagccccagaacgugguggccgccgccgccgccaaggccaagauggccaccagcauccccgagcccgagggcgccgccgccgccaccgcccagcacagcgccgagcccugggccagaaugggcggcaagagaaccaagaagagcaagcaccuggacgacgaguacgagagcagcgaggaggagagagagacccccgccgugccccccaccuggagagccagccagcccagccugaccgugagagcccagcuggcccccagaccccccauggcccccagaagccagauccccagcagacacgugcugugccugccccccagaaacgugacccugcugcaggagagagccaacaagcuggugaaguaccugaugaucaaggacuacaagaagauccccaucaagagagccgacaugcugaaggacgugaucagagaguacgacgagcacuuccccgagaucaucgagagagccaccuacacccuggagaagaaguucggcauccaccugaaggagaucgacaaggaggagcaccuguacauccuggugugcaccagagacagcagcgccagacugcugggcaagaccaaggacacccccagacugagccugcugcuggugauccugggcgugaucuucaugaacggcaacagagccagcgaggccgugcugugggaggcccugagaaagaugggccugagacccggcgugagacaccccuuccugggcgaccugagaaagcugaucaccgacgacuucgugaagcagaaguaccuggaguacaagaagauccccaacagcaacccccccgaguacgaguuccuguggggccugagagccagacacgagaccagcaagaugagagugcugagauucaucgcccagaaccagaacagagaccccagagaguggaaggcccacuuccuggaggccguggacgacgccuucaagaccauggacguggacauggccgaggagcacgccagagcccagaugagagcccagaugaacaucggcgacgaggcccugaucggcagauggagcugggacgacauccagguggagcugcugaccugggacgaggacggcgacuucggcgacgccugggccagaauccccuucgccuucugggccagauaccaccaguacauccugaacagcaacagagccaacagaagagccaccuggagagccggcgugagcagcggcaccaacggcggcgccagcaccagcgugcuggacggccccagcaccagcagcaccaucagaaccagaaacgccgccagagccggcgccagcuucuucagcuggauccagcacagauga

SEQ ID NO: 2812 - RNA, 1122 nt, Artificial Sequence
  CAG33449 variant
augccccccgugcccggcgugcccuucagaaacguggacaacgacagccccaccagcguggagcuggaggacuggguggacgcccagcaccccaccgacgaggaggaggaggaggccagcagcgccagcagcacccuguaccugguguucagccccagcagcuucagcaccagcagcagccugauccugggcggccccgaggaggaggaggugcccagcggcgugauccccaaccugaccgagagcauccccagcagccccccccagggccccccccagggccccagccagagcccccugagcagcugcugcagcagcuucagcuggagcagcuucagcgaggagagcagcagccagaagggcgaggacaccggcaccugccagggccugcccgacagcgagagcagcuucaccuacacccuggacgagaagguggccgagcugguggaguuccugcugcugaaguacgaggccgaggagcccgugaccgaggccgagaugcugaugaucgugaucaaguacaaggacuacuuccccgugauccugaagagagccagagaguucauggagcugcuguucggccuggcccugaucgaggugggccccgaccacuucugcguguucgccaacaccgugggccugaccgacgagggcagcgacgacgagggcaugcccgagaacagccugcugaucaucauccugagcgugaucuucaucaagggcaacugcgccagcgaggaggugaucugggaggugcugaacgccgugggcguguacgccggcagagagcacuucguguacggcgagcccagagagcugcugaccaaggugugggugcagggccacuaccuggaguacagagaggugccccacagcagcccccccuacuacgaguuccuguggggccccagagcccacagcgagagcaucaagaagaaggugcuggaguuccuggccaagcugaacaacaccgugcccagcagcuuccccagcugguacaaggacgcccugaaggacguggaggagagagugcaggccaccaucgacaccgccgacgacgccaccgugauggccagcgagagccugagcgugaugagcagcaacgugagcuucagcgacuga

SEQ ID NO: 2813 - RNA, 2874 nt, Artificial Sequence
  AAM08354 variant
augagccuggugagccagaacagcagaagaagaagaagaagaguggccaaggccaccgcccacaacagcagcuggggcgagaugcaggcccccaacgcccccggccugcccgccgacgugcccggcagcgacgugccccagggccccagcgacagccagauccugcagggccugugcgccagcgagggccccagcaccagcgugcugcccaccagcgccgagggccccagcaccuucgugccccccaccaucagcgaggccagcagcgccagcggccagcccaccaucagcgagggccccggcaccagcgugcugcccacccccagcgagggccugagcaccagcggcccccccaccaucagcaagggccugugcaccagcgugacccuggccgccagcgagggcagaaacaccagcagaccccccaccagcagcgaggagcccagcaccagcgugccccccaccgccagcgaggugcccagcaccagccugccccccacccccggcgagggcaccagcaccagcgugccccccaccgccuacgagggccccagcaccagcguggugcccacccccgacgagggccccagcaccagcgugcugcccacccccggcgagggccccggcaccagcgugccccuggccgccaccgagggccugagcaccagcgugcaggccacccccgacgagggccccagcaccagcgugccccccaccgccaccgagggccugagcacccccgugccccccaccagagacgagggccccagcaccagcgugcccgccacccccggcgagggccccagcaccagcgugcugcccgccgccagcgacggccagagcaucagccuggugcccaccagaggcaagggcagcagcaccagcgugccccccaccgccaccgagggccugagcaccagcgugcagcccaccgccggcgagggcagcagcaccagcgugccccccacccccggcggcggccugagcaccagcgugccccccaccgccaccgaggagcugagcaccagcgugccccccacccccggcgagggccccagcaccagcgugcugcccauccccggcgagggccugagcaccagcgugccccccaccgccagcgacggcagcgacaccagcgugccccccacccccggcgagggcgccagcacccuggugcagcccaccgcccccgacggccccggcagcagcgugcugcccaaccccggcgagggccccagcacccuguucagcagcagcgccagcguggacagaaaccccagcaagugcagccuggugcugcccagccccagagugaccaaggccagcguggacagcgacagcgagggccccaagggcgccgagggccccaucgaguucgaggugcugagagacugcgagagccccaacagcaucagcaucaugggccugaacaccagcagaguggccaucacccugaagccccaggaccccauggagcagaacguggccgagcugcugcaguuccugcuggugaaggaccagagcaaguaccccaucagagagagcgagaugagagaguacaucgugaaggaguacagaaaccaguuccccgagauccugagaagagccgccgcccaccuggagugcaucuucagauucgagcugagagagcuggaccccgaggcccacaccuacauccugcugaacaagcugggccccgugcccuucgagggccuggaggagagccccaacggccccaagaugggccugcugaugaugauccugggccagaucuuccugaacggcaaccaggccaaggaggccgagaucugggagaugcuguggagaaugggcgugcagagagagagaagacugagcaucuucggcaaccccaagagacugcugagcguggaguucguguggcagagauaccuggacuacagacccgugaccgacugcaagcccguggaguacgaguucuucuggggccccagaagccaccuggagaccaccaagaugaagauccugaaguucauggccaagaucuacaacaaggaccccauggacuggcccgagaaguacaacgaggcccuggaggaggacgccgccagagccuucgccgagggcuggcaggcccugccccacuucagaagacccuucuucgaggaggccgccgccgaggugcccagccccgacagcgaggugagcagcuacagcagcaaguacgccccccacagcuggcccgagagcagacuggagagcaaggccagaaagcuggugcagcuguuccugcugauggacagcaccaagcugcccauccccaagaagggcauccuguacuacaucggcagagagugcagcaagguguuccccgaccugcugaacagagccgccagaacccugaaccacguguacggcaccgagcugguggugcuggaccccagaaaccacagcuacacccuguacaacagaagagagauggaggagaccgaggagaucguggacagccccaacagacccggcaacaacuuccugaugcaggugcugagcuucaucuucaucaugggcaaccacgccagagagagcgccgugugggccuuccugagaggccugggcgugcaggccggcagaaagcacgugaucaccugcagauaccugagccagagauacaucgacagccugagagugcccgacagcgaccccgugcaguacgaguucguguggggccccagagccagacuggagaccagcaagaugaaggcccugagauacguggccagaauccacagaaaggagccccaggacuggccccagcaguacagagaggccauggaggacgaggccaacagagccgacgugggccacagacagaucuucgugcacaacuucagauga

SEQ ID NO: 2814 - RNA, 1572 nt, Artificial Sequence
  AAH93964 variant
augagccuggugagccagaacgccagacacugcagcgccgagaucaccgccgacuacggcgacggcagaggcgagauccaggccaccaacgccagcggcagccccaccagcaugcuggugguggacgccccccagugcccccaggcccccaucaacagccagugcgugaacaccagccaggccgugcaggaccccaacgaccuggaggugcugaucgacgagcagagcagaagacugggcgcccugagagugcacgacccccuggaggacagaagcaucgcccuggugaacuucaugagaaugaagagccagaccgagggcagcauccagcagagcgagaugcuggaguuccugagagaguacagcgaccaguuccccgagauccugagaagagccagcgcccaccuggaccagguguucggccugaaccugagagugaucgacccccaggccgacaccuacaaccuggugagcaagagaggcuuccagaucaccgacagaaucgccgagagccuggacaugcccaaggccagccugcuggcccuggugcugggccacauccugcugaacggcaacagagccagagaggccagcaucugggaccugcugcugaagguggacaugugggacaagccccagagaaucaacaaccuguucggcaacaccagaaaccugcugaccaccgacuucgugugcaugagauuccuggaguacuggcccguguacggcaccaacccccuggaguucgaguuccuguggggcagcagagcccacagagagaucaccaagauggaggcccugaaguucgugagcgacgcccacgacgaggagcccuggagcuggcccgaggaguacaacaaggcccuggagggcgacaagaccaaggagagaagccugaccgccggccuggaguucuggagcgaggacaccaugaacgacaaggccaacgaccuggugcagcuggccaucagcgugaccgaggagaugcugcccauccaccaggacgagcugcuggcccacaccggcaaggaguucgaggacguguuccccaacauccugaacagagccacccugauccuggacauguucuacggccugagccugaucgagguggacaccagcgagcacaucuaccugcuggugcagcagcccgagagcgaggaggagcaggugaugcuggagagccugggcagacccacccaggaguacgugaugcccauccugggccugaucuuccugaugggcaacagagugaaggaggccaacguguggaaccugcugagaagauucagcguggacgugggcagaaagcacagcaucaccagaaagcugaugagacagagauaccuggagugcagaccccugagcuacagcaaccccguggaguacgagcugcuguggggccccagagcccaccacgagaccaucaagaugaaggugcuggaguacauggccagacuguacagaaagagaccccagaacuggcccgagcaguacagagaggccguggaggacgaggaggccagagccaagagcgaggccaccaucauguucuuccuggaccccaccuga

SEQ ID NO: 2815 - RNA, 924 nt, Artificial Sequence
  CCDS3269.1 variant
augcugcagacccccgagagcagaggccugcccgugccccaggccgagggcgagaaggacggcggccacgacggcgagaccagagcccccaccgccagccaggagagacccaaggaggagcugggcgccggcagagaggagggcgccgccgagcccgcccugaccagaaagggcgccagagcccuggccgccaaggcccuggccagaagaagagccuacagaagacugaacagaaccguggccgagcuggugcaguuccugcuggugaaggacaagaagaagagccccaucaccagaagcgagauggugaaguacgugaucggcgaccugaagauccuguuccccgacaucaucgccagagccgccgagcaccugagauacguguucggcuucgagcugaagcaguucgacagaaagcaccacaccuacauccugaucaacaagcugaagccccuggaggaggaggaggaggaggaccugggcggcgacggccccagacugggccugcugaugaugauccugggccugaucuacaugagaggcaacagcgccagagaggcccaggugugggagaugcugagaagacugggcgugcagcccagcaaguaccacuuccuguucggcuaccccaagagacugaucauggaggacuucgugcagcagagauaccugagcuacagaagagugccccacaccaacccccccgaguacgaguucagcuggggccccagaagcaaccuggagaucagcaagauggaggugcugggcuucguggccaagcugcacaagaaggagccccagcacuggcccgugcaguacagagaggcccuggccgacgaggccgacagagccagagccaaggccagagccgaggccagcaugagagccagagccagcgccagagccggcauccaccugugguga

SEQ ID NO: 2816 - RNA, 660 nt, Artificial Sequence
  AAD31314 variant
augcccagaggcagaaagagcagaagaagaagaaacgccagagccgccgaggagaacagaaacaacagaaagauccaggccagcgaggccagcgagacccccauggccgccagcgugguggccagcacccccgaggacgaccugagcggccccgaggaggaccccagcacccccgaggaggccagcaccacccccgaggaggccagcagcaccgcccaggcccagaagcccagcgugcccagaagcaacuuccagggcaccaagaagagccugcugaugagcauccuggcccugaucuucaucaugggcaacagcgccaaggaggcccugguguggaaggugcugggcaagcugggcaugcagcccggcagacagcacagcaucuucggcgaccccaagaagaucgugaccgaggaguucgugagaagaggcuaccugaucuacaagcccgugcccagaagcagccccguggaguacgaguucuucuggggccccagagcccacguggagagcagcaagcugaaggugaugcacuucguggccagagugagaaacagaugcagcaaggacuggcccugcaacuacgacugggacagcgacgacgacgccgagguggaggccauccugaacagcggcgccagaggcuacagcgcccccuga

SEQ ID NO: 2817 - RNA, 3750 nt, Artificial Sequence
  CCDS73700.1 variant
augagccagcugagcaagaaccugggcgacagcagcccccccgccgaggcccccaagccccccguguacagcagacccaccgugcugaugagagccccccccgccagcagcagagccccccccgugcccugggaccccccccccaucgaccugcaggccagccuggccgccuggcaggccccccagcccgccugggaggccccccagggccagcugcccgcccccguggugcccaugacccagccccccgcccugggcggccccaucgugcccgcccccccccugggcggccccaugggcaagccccccacccccggcgugcugauggugcacccccccccccccggcgcccccauggcccagccccccacccccggcgugcugauggugcaccccagcgcccccggcgcccccauggcccacccccccccccccggcacccccaugagccacccccccccccccggcacccccauggcccacccccccccccccggcacccccauggcccacccccccccccccggcacccccauggugcacccccccccccccggcacccccauggcccacccccccccccccggcacccccauggcccacccccccccccccggcacccccauggcccacccccccccccccggcacccccauggcccacccccccccccccggcacccccauggcccagccccccgcccccggcgugcugauggcccagccccugacccccggcgugcugauggugcagcccgccgcccccggcgcccccauggugcagcccccccccgccgccaugaugacccagccccagcccagcggcgcccccauggccaagccccccggccccggcgugcugaugauccacccccccggcgccagagcccccaugacccagccccccgccagcggcgcccccauggcccagcccgccgccccccccgcccagcccauggccccccccgcccagcccauggccagcugggccccccaggcccagccccugauccugcagauccagagccaggugaucagagcccccccccaggugccccagggcccccaggccccccccgcccagcuggccaccccccccggcuggcaggccaccagccccggcuggcaggccacccagcagggcuggcaggccaccccccugaccuggcagaccacccaggugaccuggcaggcccccgccgugaccuggcaggugcccccccccaugagacagggccccccccccaucagacccggccccccccccaucagacccggccccccccccgugagacaggcccccccccugaucagacaggccccccccgugaucagacaggccccccccgugaucagacaggccccccccgugaucagacaggcccccgccgugaucagacaggccccccccgugaucagacaggccccccccgugaucagacaggccccccccgugaucagacaggcccccccccugaucagacaggcccccccccccaucagacccgccccccaggugcuggccacccagcccccccuguggcaggcccugccccccccccccccccugagacaggccccccaggccagacugcccgccccccaggugcaggccgccccccaggugcccaccgccccccccgccacccaggugcccgccgccccccccgccggcccccaggugccccagcccgugcugcccgccccccugagcgccccccugagcgccccccaggccgugcacugccccagcaucaucuggcaggcccccaagggccagccccccgugccccacgagauccccaccagcauggaguuccaggaggugcagcagacccaggcccuggccuggcaggcccagaaggcccccacccacaucuggcagccccugcccgcccaggaggcccagagacaggcccccccccuggugcagcuggagcagcccuuccagggcgccccccccagccagaaggccgugcagauccagcugcccccccagcaggcccaggccagcggcccccaggccgaggugcccacccugccccugcagcccagcuggcaggccccccccgccgugcugcaggcccagcccggcccccccguggccgccgccaacuucccccugggcagcgccaagagccugaugacccccagcggcgagugcagagccagcagcaucgacagaagaggcagcagcaaggagagaagaaccagcagcaaggagagaagagcccccagcaaggacagaaugaucuucgccgccaccuucugcgcccccaaggccgugagcgccgccagagcccaccugcccgccgccuggaagaaccugcccgccacccccgagaccuucgcccccagcagcagcguguuccccgccaccagccaguuccagcccgccagccugaacgccuucaagggccccagcgccgccagcgagacccccaagagccugcccuacgcccugcaggaccccuucgccugcguggaggcccugcccgccgugcccugggugccccagcccaacaugaacgccagcaaggccagccaggccgugcccaccuuccugauggccaccgccgccgccccccaggccaccgccaccacccaggaggccagcaagaccagcguggagccccccagaagaagcggcaaggccaccagaaagaagaagcaccuggaggcccaggaggacagcagaggccacacccuggccuuccacgacuggcagggccccagacccugggagaaccugaaccugagcgacugggaggugcagagccccauccaggugagcggcgacugggagcaccccaacacccccagaggccugagcggcugggagggccccagcaccagcagaauccugagcggcugggagggccccagcgccagcugggcccugagcgccugggagggccccagcaccagcagagcccugggccugagcgagagccccggcagcagccugcccgugguggugagcgagguggccagcgugagccccggcagcagcgccacccaggacaacagcaagguggaggcccagccccugagcccccuggacgagagagccaacgcccuggugcaguuccugcuggugaaggaccaggccaaggugcccgugcagagaagcgagauggugaaggugauccugagagaguacaaggacgagugccuggacaucaucaacagagccaacaacaagcuggagugcgccuucggcuaccagcugaaggagaucgacaccaagaaccacgccuacaucaucaucaacaagcugggcuaccacaccggcaaccugguggccagcuaccuggacagacccaaguucggccugcugaugguggugcugagccugaucuucaugaagggcaacugcgugagagaggaccugaucuucaacuuccuguucaagcugggccuggacgugagagagaccaacggccuguucggcaacaccaagaagcugaucaccgagguguucgugagacagaaguaccuggaguacagaagaauccccuacaccgagcccgccgaguacgaguuccuguggggccccagagccuuccuggagaccagcaagaugcuggugcugagauuccuggccaagcugcacaagaaggacccccagagcuggcccuuccacuaccuggaggcccuggccgagugcgagugggaggacaccgacgaggacgagcccgacaccggcgacagcgcccacggccccaccagcagacccccccccagauga

SEQ ID NO: 2818 - RNA, 282 nt, Artificial Sequence
  AAC39608 variant
augaagcugcugauggugcugaugcuggccgcccugagccagcacugcuacgccggcagcggcugcccccugcuggagaacgugaucagcaagaccaucaacccccaggugagcaagaccgaguacaaggagcugcugcaggaguucaucgacgacaacgccaccaccaacgccaucgacgagcugaaggagugcuuccugaaccagaccgacgagacccugagcaacguggagguguucaugcagcugaucuacgacagcagccugugcgaccuguucuga

SEQ ID NO: 2819 - RNA, 363 nt, Artificial Sequence
  AAH67220 variant
augaagcugcugauggugcugaugcuggccgcccugagccagcacugcuacgccggcagcggcugcccccugcuggagaacgugaucagcaagaccaucaacccccaggugagcaagaccgaguacaaggagcugcugcaggaguucaucgacgacaacgccaccaccaacgccaucgacgagcugaaggagugcuuccugaaccagaccgacgagacccugagcaacguggagguguucauggugaucagcuucagcagcuacaagcuguucaagagccccgaccagggccaggugggcagcagcuuccugaccgacaacgccaaggccaccagcgagcaggccuucagcuacaucggcuga

SEQ ID NO: 2820 - RNA, 357 nt, Artificial Sequence
  AAA19238 variant
augcccagagaggacgcccacuucaucuacggcuaccccaagaagggccacggccacagcuacaccaccgccgaggaggccgccggcaucggcauccugaccgugauccugggcgugcugcugcugaucggcugcugguacugcagaagaagaaacggcuacagagcccugauggacaagagccugcacgugggcacccagugcgcccugaccagaagaugcccccaggagggcuucgaccacagagacagcaaggugagccugcaggagaagaacugcgagcccguggugcccaacgccccccccgccuacgagaagcugagcgccgagcagagccccccccccuacagccccuga

SEQ ID NO: 2821 - RNA, 1482 nt, Artificial Sequence
  EAW93427 variant
augcugcccagaugggagcuggcccuguaccugcuggccagccugggcuuccacuucuacagcuucuacgagguguacaaggugagcagagagcacgaggaggagcuggaccaggaguucgagcuggagaccgacacccuguucggcggccugaagaaggacgccaccgacuucgaguggagcuucuggauggaguggggcaagcaguggcugguguggcugcugcugggccacaugguggugagccagauggccacccugcuggccagaaagcacagacccuggauccugaugcuguacggcaugugggccugcuggugcgugcugggcacccccggcguggccauggugcugcugcacaccaccaucagcuucugcguggcccaguucagaagccagcugcugaccuggcugugcagccugcugcugcugagcacccugagacugcagggcguggaggaggugaagagaagaugguacaagaccgagaacgaguacuaccugcugcaguucacccugaccgugagaugccuguacuacaccagcuucagccuggagcugugcuggcagcagcugcccgccgccagcaccagcuacagcuuccccuggaugcuggccuacguguucuacuaccccgugcugcacaacggccccauccugagcuucagcgaguucaucaagcagaugcagcagcaggagcacgacagccugaaggccagccugugcgugcuggcccugggccugggcagacugcugugcuggugguggcuggccgagcugauggcccaccugauguacaugcacgccaucuacagcagcaucccccugcuggagaccgugagcugcuggacccugggcggccuggcccuggcccaggugcuguucuucuacgugaaguaccuggugcuguucggcgugcccgcccugcugaugagacuggacggccugaccccccccgcccugcccagaugcgugagcaccauguucagcuucaccggcauguggagauacuucgacgugggccugcacaacuuccugaucagauacguguacauccccgugggcggcagccagcacggccugcugggcacccuguucagcaccgccaugaccuucgccuucgugagcuacuggcacggcggcuacgacuaccuguggugcugggccgcccugaacuggcugggcgugaccguggagaacggcgugagaagacugguggagacccccugcauccaggacagccuggccagauacuucagcccccaggccagaagaagauuccacgccgcccuggccagcugcagcaccagcaugcugauccugagcaaccugguguuccugggcggcaacgaggugggcaagaccuacuggaacagaaucuucauccagggcuggcccugggugacccugagcgugcugggcuuccuguacugcuacagccacgugggcaucgccugggcccagaccuacgccaccgacuga

SEQ ID NO: 2822 - RNA, 954 nt, Artificial Sequence
  AAD41349 variant
auggccgugcagggcagccagagaagacugcugggcagccugaacagcacccccaccgccaucccccagcugggccuggccgccaaccagaccggcgccagaugccuggaggugagcaucagcgacggccuguuccugagccugggccuggugagccugguggagaacgcccuggugguggccaccaucgccaagaacagaaaccugcacagccccauguacugcuucaucugcugccuggcccugagcgaccugcuggugagcggcagcaacgugcuggagaccgccgugauccugcugcuggaggccggcgcccugguggccagagccgccgugcugcagcagcuggacaacgugaucgacgugaucaccugcagcagcaugcugagcagccugugcuuccugggcgccaucgccguggacagauacaucagcaucuucuacgcccugagauaccacagcaucgugacccugcccagagccagaagagccguggccgccaucuggguggccagcgugguguucagcacccuguucaucgccuacuacgaccacguggccgugcugcugugccuggugguguucuuccuggccaugcuggugcugauggccgugcuguacgugcacaugcuggccagagccugccagcacgcccagggcaucgccagacugcacaagagacagagacccgugcaccagggcuucggccugaagggcgccgugacccugaccauccugcugggcaucuucuuccugugcuggggccccuucuuccugcaccugacccugaucgugcugugccccgagcaccccaccugcggcugcaucuucaagaacuucaaccuguuccuggcccugaucaucugcaacgccaucaucgacccccugaucuacgccuuccacagccaggagcugagaagaacccugaaggaggugcugaccugcagcugguga

SEQ ID NO: 2823 - RNA, 954 nt, Artificial Sequence; identical to SEQ ID NO: 2822
  AHC09522 variant

SEQ ID NO: 2824 - RNA, 954 nt, Artificial Sequence
  AHC09804 variant
auggccgugcagggcagccagagaagacugcugggcagccugaacagcacccccaccgccaucccccagcugggccuggccgccaaccagaccggcgccagaugccuggaggugagcaucagcgacggccuguuccugagccugggccuggugagccugguggagaacgcccuggugguggccaccaucgccaagaacagaaaccugcacagccccauguacugcuucaucugcugccuggcccugagcgaccugcuggugagcggcagcaacgugcuggagaccgccgugauccugcugcuggaggccggcgcccugguggccagagccgccgugcugcagcagcuggacaacgugaucgacgugaucaccugcagcagcaugcugagcagccugugcuuccugggcgccaucgccguggacagauacaucagcaucuucuacgcccugagauaccacagcaucgugacccugcccagagccagacaggccguggccgccaucuggguggccagcgugguguucagcacccuguucaucgccuacuacgaccacguggccgugcugcugugccuggugguguucuuccuggccaugcuggugcugauggccgugcuguacgugcacaugcuggccagagccugccagcacgcccagggcaucgccagacugcacaagagacagagacccgugcaccagggcuucggccugaagggcgccgugacccugaccauccugcugggcaucuucuuccugugcuggggccccuucuuccugcaccugacccugaucgugcugugccccgagcaccccaccugcggcugcaucuucaagaacuucaaccuguuccuggcccugaucaucugcaacgccaucaucgacccccugaucuacgccuuccacagccaggagcugagaagaacccugaaggaggugcugaccugcagcugguga

SEQ ID NO: 2825 - RNA, 954 nt, Artificial Sequence
  BAE94313 variant
auggccgugcagggcagccagagaagacugcugggcagccugaacagcacccccaccgccaucccccagcugggccuggccgccaaccagaccggcgccagaugccuggaggugagcaucagcgacggccuguuccugagccugggccuggugagccugguggagaacgcccuggugguggccaccaucgccaagaacagaaaccugcacagccccauguacugcuucaucugcugccuggcccugagcgaccugcuggugagcggcagcaacgugcuggagaccgccgugauccugcugcuggaggccggcgcccugguggccagagccgccgugcugcagcagcuggacaacgugaccgacgugaucaccugcagcagcaugcugagcagccugugcuuccugggcgccaucgccguggacagauacaucagcaucuucuacgcccugagauaccacagcaucgugacccugcccagagccagaagagccguggccgccaucuggguggccagcgugguguucagcacccuguucaucgccuacuacgaccacguggccgugcugcugugccuggugguguucuuccuggccaugcuggugcugauggccgugcuguacgugcacaugcuggccagagccugccagcacgcccagggcaucgccagacugcacaagagacagagacccgugcaccagggcuucggccugaagggcgccgugacccugaccauccugcugggcaucuucuuccugugcuggggccccuucuuccugcaccugacccugaucgugcugugccccgagcaccccaccugcggcugcaucuucaagaacuucaaccuguuccuggcccugaucaucugcaacgccaucaucgacccccugaucuacgccuuccacagccaggagcugagaagaacccugaaggaggugcugaccugcagcugguga

SEQ ID NO: 2826 - RNA, 954 nt, Artificial Sequence
  AHC09531 variant
auggccgugcagggcagccagagaagacugcugggcagccugaacagcacccccaccgccaucccccagcugggccuggccgccaaccagaccggcgccagaugccuggaggugagcaucagcgacggccuguuccugagccugggccuggugagccugguggagaacgcccuggugguggccaccaucgccaagaacagaaaccugcacagccccauguacugcuucaucugcugccuggcccugagcgaccugcuggugagcggcagcaacaugcuggagaccgccgugauccugcugcuggaggccggcgcccugguggccagagccgccgugcugcagcagcuggacaacgugaucgacgugaucaccugcagcagcaugcugagcagccugugcuuccugggcgccaucgccguggacagauacaucagcaucuucuacgcccugagauaccacagcaucgugacccugcccagagccagaagagccguggccgccaucuggguggccagcgugguguucagcacccuguucaucgccuacuacgaccacguggccgugcugcugugccuggugguguucuuccuggccaugcuggugcugauggccgugcuguacgugcacaugcuggccagagccugccagcacgcccagggcaucgccagacugcacaagagacagagacccgugcaccagggcuucggccugaagggcgccgugacccugaccauccugcugggcaucuucuuccugugcuggggccccuucuuccugcaccugacccugaucgugcugugccccgagcaccccaccugcggcugcaucuucaagaacuucaaccuguuccuggcccugaucaucugcaacgccaucaucgacccccugaucuacgccuuccacagccaggagcugagaagaacccugaaggaggugcugaccugcagcugguga

SEQ ID NO: 2827 - RNA, 954 nt, Artificial Sequence
  BAE94311 variant
auggccgugcagggcagccagagaagacugcugggcagccugaacagcacccccaccgccaucccccagcugggccuggccgccaaccagaccggcgccagaugccuggaggugagcaucagcgacggccuguuccugagccugggccuggugagccugguggagaacgcccuggugguggccaccaucgccaagaaccagaaccugcacagccccauguacugcuucaucugcugccuggcccugagcgaccugcuggugagcggcagcaacgugcuggagaccgccgugauccugcugcuggaggccggcgcccugguggccagagccgccgugcugcagcagcuggacaacgugaucgacgugaucaccugcagcagcaugcugagcagccugugcuuccugggcgccaucgccguggacagauacaucagcaucuucuacgcccugagauaccacagcaucgugacccugcccagagccagacaggccguggccgccaucuggguggccagcgugguguucagcacccuguucaucgccuacuacgaccacguggccgugcugcugugccuggugguguucuuccuggccaugcuggugcugauggccgugcuguacgugcacaugcuggccagagccugccagcacgcccagggcaucgccagacugcacaagagacagagacccgugcaccagggcuucggccugaagggcgccgugacccugaccauccugcugggcaucuucuuccugugcuggggccccuucuuccugcaccugacccugaucgugcugugccccgagcaccccaccugcggcugcaucuucaagaacuucaaccuguuccuggcccugaucaucugcaacgccaucaucgacccccugaucuacgccuuccacagccaggagcugagaagaacccugaaggaggugcugaccugcagcugguga

SEQ ID NO: 2828 - RNA, 954 nt, Artificial Sequence
  BAE94309 variant
auggccgugcagggcagccagagaagacugcugggcagccugaacagcacccccaccgccaucccccagcugggccuggccgccaaccagaccggcgccagaugccuggaggugagcaucagcgacggccuguuccugagccugggccuggugagccugguggagaacgcccuggugguggccaccaucgccaagaacagaaaccugcacagccccauguacugcuucaucugcugccuggcccugagcgaccugcuggugagcggcagcaacgugcuggagaccgccgugauccugcugcuggaggccggcgcccugguggccagagccgccgugcugcagcagcuggacaacgugaucgacgugaucaccugcagcagcaugcugagcagccugugcuuccugggcgccaucgccguggacagauacaucagcaucuucuacgcccugagauaccacagcaucgugacccugcccagagccagacaggccgugggcgccaucuggguggccagcgugguguucagcacccuguucaucgccuacuacgaccacguggccgugcugcugugccuggugguguucuuccuggccaugcuggugcugauggccgugcuguacgugcacaugcuggccagagccugccagcacgcccagggcaucgccagacugcacaagagacagagacccgugcaccagggcuucggccugaagggcgccgugacccugaccauccugcugggcaucuucuuccugugcuggggccccuucuuccugcaccugacccugaucgugcugugccccgagcaccccaccugcggcugcaucuucaagaacuucaaccuguuccuggcccugaucaucugcaacgccaucaucgacccccugaucuacgccuuccacagccaggagcugagaagaacccugaaggaggugcugaccugcagcugguga

SEQ ID NO: 2829 - RNA, 954 nt, Artificial Sequence
  BAE94308 variant
auggccgugcagggcagccagagaagacugcugggcagccugaacagcacccccaccgccaucccccagcugggccuggccgccaaccagaccggcgccagaugccuggaggugagcaucagcgacggccuguuccugagccugggccuggugagccugguggagaacgcccuggugguggccaccaucgccaagaacagaaaccugcacagccccauguacugcuucaucugcugccuggcccugagcgaccugcuggugagcggcagcaacgugcuggagaccgccgugauccugcugcuggaggccggcgcccugguggccagagccgccgugcugcagcagcuggacaacgugaccgacgugaucaccugcagcagcaugcugagcagccugugcuuccugggcgccaucgccguggacagauacaucagcaucuucuacgcccugagauaccacagcaucgugacccugaccagagccagaagagccguggccgccaucuggguggccagcgugguguucagcacccuguucaucgccuacuacgaccacguggccgugcugcugugccuggugguguucuuccuggccaugcuggugcugauggccgugcuguacgugcacaugcuggccagagccugccagcacgcccagggcaucgccagacugcacaagagacagagacccgugcaccagggcuucggccugaagggcgccgugacccugaccauccugcugggcaucuucuuccugugcuggggccccuucuuccugcaccugacccugaucgugcugugccccgagcaccccaccugcggcugcaucuucaagaacuucaaccuguuccuggcccugaucaucugcaacgccaucaucgacccccugaucuacgccuuccacagccaggagcugagaagaacccugaaggaggugcugaccugcagcugguga

SEQ ID NO: 2830 - RNA, 954 nt, Artificial Sequence
  BAE94307 variant
auggccgugcagggcagccagagaagacugcugggcagccugaacagcacccccaccgccaucccccagcugggccuggccgccaaccagaccggcgccagaugccuggaggugagcaucagcgacggccuguuccugagccugggccuggugagccugguggagaacgcccuggugguggccaccaucgccaagaacagaaaccugcacagccccauguacugcuucaucugcugccuggcccugagcgaccugcuggugagcggcagcaacaugcuggagaccgccgugauccugcugcuggaggccggcgcccugguggccagagccgccgugcugcagcagcuggacaacgugaucgacgugaucaccugcagcagcaugcugagcagccugugcuuccugggcgccaucgccguggacagauacaucagcaucuucuacgcccugagauaccacagcaucgugauccugcccagagccagaagagccguggccgccaucuggguggccagcgugguguucagcacccuguucaucgccuacuacgaccacguggccgugcugcugugccuggugguguucuuccuggccaugcuggugcugauggccgugcuguacgugcacaugcuggccagagccugccagcacgcccagggcaucgccagacugcacaagagacagagacccgugcaccagggcuucggccugaagggcgccgugacccugaccauccugcugggcaucuucuuccugugcuggggccccuucuuccugcaccugacccugaucgugcugugccccgagcaccccaccugcggcugcaucuucaagaacuucaaccuguuccuggcccugaucaucugcaacgccaucaucgacccccugaucuacgccuuccacagccaggagcugagaagaacccugaaggaggugcugaccugcagcugguga

SEQ ID NO: 2831 - RNA, 951 nt, Artificial Sequence
  BAE94306 variant
auggccgugcagggcagccagagaagacugcugggcagccugaacagcacccccaccgccaucccccagcugggccuggccgccaaccagaccggcgccagaugccuggaggugagcaucagcgacggccuguuccugagccugggccuggugagccugguggagaacgcccuggugguggccaccaucgccaagaacagaaaccugcacagccccauguacugcuucaucugcugccuggcccugagcgaccugcuggugagcggcagcaacgugcuggagaccgccgugauccugcugcuggaggccggcgcccugguggccagagccgccgugcugcagcagcuggacaacgugaucgacgugaucaccugcagcagcaugcugagcagccugugcuuccugggcgccaucgccguggacagauacaucagcaucuacgcccugagauaccacagcaucgugacccugcccagagccagacaggccguggccgccaucuggguggccagcgugguguucagcacccuguucaucgccuacuacgaccacguggccgugcugcugugccuggugguguucuuccuggccaugcuggugcugauggccgugcuguacgugcacaugcuggccagagccugccagcacgcccagggcaucgccagacugcacaagagacagagacccgugcaccagggcuucggccugaagggcgccgugacccugaccauccugcugggcaucuucuuccugugcuggggccccuucuuccugcaccugacccugaucgugcugugccccgagcaccccaccugcggcugcaucuucaagaacuucaaccuguuccuggcccugaucaucugcaacgccaucaucgacccccugaucuacgccuuccacagccaggagcugagaagaacccugaaggaggugcugaccugcagcugguga

SEQ ID NO: 2832 - RNA, 954 nt, Artificial Sequence
  AAQ62977 variant
auggccgugcagggcagccagagaagacugcugggcagccugaacagcacccccaccgccaucccccagcugggccuggccgccaaccagaccggcgccagaugccuggaggugagcaucagcgacggccuguuccugagccugggccuggugagccugguggagaacgcccuggugguggccaccaucgccaagaacagaaaccugcacagccccauguacugcuucaucugcugccuggcccugagcgaccugcuggugagcggcagcaacgugcuggagaccgccgugauccugcugcuggaggccggcgcccugguggccagagccgccgugcugcagcagcuggacaacgugaucgacgugaucaccugcagcagcaugcugagcagccugugcuuccugggcgccaucgccguggacagauacaucagcaucuucuacgcccugagauaccacagcaucgugacccugcccagagccagaagagccguggccgccaucuggguggccagcgugguguucagcacccuguucaucgccuacuacgaccacguggccgugcugcugugccuggugguguucuuccuggccaugcuggugcugauggccgugcuguacgugcacaugcuggccagagccugccagcacgcccagggcaucgccagacugcacaagagacagagacccgugcaccagggcuucggccugaagggcgccgugacccugaccauccugcugggcaucuucuuccugugcuggggccccuucuuccugcaccugacccugaucauccugugccccgagcaccccaccugcggcugcaucuucaagaacuucaaccuguuccuggcccugaucaucugcaacgccaucaucgacccccugaucuacgccuuccacagccaggagcugagaagaacccugaaggaggugcugaccugcagcugguga

SEQ ID NO: 2833 - RNA, 954 nt, Artificial Sequence
  AAQ62975 variant
auggccgugcagggcagccagagaagacugcugggcagccugaacagcacccccaccgccaucccccagcugggccuggccgccaaccagaccggcgccagaugccuggaggugagcaucagcgacggccuguuccugagccugggccuggugagccugguggagaacgcccuggugguggccaccaucgccaagaacagaaaccugcacagccccauguacugcuucaucugcugccuggcccugagcgaccugcuggugagcggcagcaacgugcuggagaccgccgugauccugcugcuggaggccggcgcccugguggccagagccguggugcugcagcagcuggacaacgugaucgacgugaucaccugcagcagcaugcugagcagccugugcuuccugggcgccaucgccguggacagauacaucagcaucuucuacgcccugagauaccacagcaucgugacccugcccagagccagaagagccguggccgccaucuggguggccagcgugguguucagcacccuguucaucgccuacuacgaccacguggccgugcugcugugccuggugguguucuuccuggccaugcuggugcugauggccgugcuguacgugcacaugcuggccagagccugccagcacgcccagggcaucgccagacugcacaagagacagagacccgugcaccagggcuucggccugaagggcgccgugacccugaccauccugcugggcaucuucuuccugugcuggggccccuucuuccugcaccugacccugaucgugcugugccccgagcaccccaccugcggcugcaucuucaagaacuucaaccuguuccuggcccugaucaucugcaacgccaucaucgacccccugaucuacgccuuccacagccaggagcugagaagaacccugaaggaggugcugaccugcagcugguga

SEQ ID NO: 2834 - RNA, 954 nt, Artificial Sequence
  AAQ62974 variant
auggccgugcagggcagccagagaagacugcugggcagccugaacagcacccccaccgccaucccccagcugggccuggccgccaaccagaccggcgccagaugccuggaggugagcaucagcgacggccuguuccugagccugggccuggugagccugguggagaacgcccuggugguggccaccaucgccaagaacagaaaccugcacagccccauguacugcuucaucugcugccuggcccugagcgaccugcuggugagcggcagcaacgugcuggagaccgccgugauccugcugcuggaggccggcgcccugguggccagagccgccgugcugcagcagcuggacaacgugaucgacgugaucaccugcagcagcaugcugagcagccugugcuuccugggcgccaucgccguggacagauacaucagcaucuucuacgcccugagauaccacagcaucgugacccugcccagagccagaagagccguggccgccaucuggguggccagcgugguguucagcacccuguucaucgccuacuacgaccacguggccgugcugcugugccuggugguguucuuccuggccaugcuggugcugauggccgugcuguacgugcacaugcuggccagagccugccagcacgcccagggcaucgccagacugcacaagagacagagacccgugcaccagggcuucggccugaagggcgccgugacccugaccauccugcugggcaucuucuuccugugcuggggccccuucuuccugcaccugacccugaucgugcugugccccgagcaccccaccugcggcugcaucuucaagaacuucaaccuguuccuggcccugaucaucugcaacgccaucaucgacccccugaucuacgccuuccacagccaggagcugagaagaacccugaaggaggugcugaccagaagcugguga

SEQ ID NO: 2835 - RNA, 954 nt, Artificial Sequence
  AAQ62973 variant
auggccgugcagggcagccagagaagacugcugggcagccugaacagcacccccaccgccaucccccagcugggccuggccgccaaccagaccggcgccagaugccuggaggugagcaucagcgacggccuguuccugagccugggccuggugagccugguggagaacgcccuggugguggccaccaucgccaagaacagaaaccugcacagccccauguacugcuucaucugcugccuggcccugagcgaccugcuggugagcggcagcaacgugcuggagaccgccgugauccugcugcuggaggccggcgcccugguggccagagccgccgugcugcagcagcuggacaacgugaucgacgugaucaccugcagcagcaugcugagcagccugugcuuccugggcgccaucgccguggacagauacaucagcaucuucuacgcccugagauaccacagcaucgugacccugcccagagccagaagagccguggccgccaucuggguggccagcgugguguucagcacccuguucaucgccuacuacgaccacguggccgugcugcugugccuggugguguucuuccuggccaugcuggugcugauggccgugcuguacgugcacaugcuggccagagccugccagcacgcccagggcaucgccagacugcacaagagacagagacccgugcaccagggcuucggccugaagggcgccgugacccugaccauccugcugggcaucuucuuccugugcuggggccccuucuuccugcaccugacccugaucgugcugugccccgagcaccccaccugcggcugcaucuucaagaacuucaaccuguuccuggcccugaucaucugcaacgccaucaucgacccccugaucuacgccuuccacagccaggagcugagaagaaugcugaaggaggugcugaccugcagcugguga

SEQ ID NO: 2836 - RNA, 954 nt, Artificial Sequence
  AAQ62972 variant
auggccgugcagggcagccagagaagacugcugggcagccugaacagcacccccaccgccaucccccagcugggccuggccgccaaccagaccggcgccagaugccuggaggugagcaucagcgacggccuguuccugagccugggccuggugagccugguggagaacgcccuggugguggccaccaucgccaagaacagaaaccugcacagccccauguacugcuucaucugcugccuggcccugagcgaccugcuggugagcggcagcaacgugcuggagaccgccgugauccugcugcuggaggccggcgcccugguggccagagccgccgugcugcagcagcuggacaacgugaucgacgugaucaccugcagcagcaugcugagcagccugugcuuccugggcgccaucgccguggacagauacaucagcaucuucuacgcccugagauaccacagcaucgugacccugcccagagccagaagagccguggccgccaucuggguggccagcgugguguucagcacccuguucaucgccuacuacgaccacguggccgugcugcugugccuggugguguucuuccuggccaugcuggugcugauggccgugcuguacgugcacaugcuggccugggccugccagcacgcccagggcaucgccagacugcacaagagacagagacccgugcaccagggcuucggccugaagggcgccgugacccugaccauccugcugggcaucuucuuccugugcuggggccccuucuuccugcaccugacccugaucgugcugugccccgagcaccccaccugcggcugcaucuucaagaacuucaaccuguuccuggcccugaucaucugcaacgccaucaucgacccccugaucuacgccuuccacagccaggagcugagaagaacccugaaggaggugcugaccugcagcugguga

SEQ ID NO: 2837 - RNA, 954 nt, Artificial Sequence
  AAQ62971 variant
auggccgugcagggcagccagagaagacugcugggcagccugaacagcacccccaccgccaucccccagcugggccuggccgccaaccagaccggcgccagaugccuggaggugagcaucagcgacggccuguuccugagccugggccuggugagccugguggagaacgcccuggugguggccaccaucgccaagaacagaaaccugcacagccccauguacugcuucaucugcugccuggcccugagcgaccugcuggugagcggcagcaacgugcuggagaccgccgugauccugcugcuggaggccggcgcccugguggccagagccgccgugcugcagcagcuggacaacgugaucgacgugaucaccugcagcagcaugcugagcagccugugcuuccugggcgccaucgccguggacagauacaucagcaucuucuacgcccugagauaccacagcaucgugacccugccccaggccagaagagccguggccgccaucuggguggccagcgugguguucagcacccuguucaucgccuacuacgaccacguggccgugcugcugugccuggugguguucuuccuggccaugcuggugcugauggccgugcuguacgugcacaugcuggccagagccugccagcacgcccagggcaucgccagacugcacaagagacagagacccgugcaccagggcuucggccugaagggcgccgugacccugaccauccugcugggcaucuucuuccugugcuggggccccuucuuccugcaccugacccugaucgugcugugccccgagcaccccaccugcggcugcaucuucaagaacuucaaccuguuccuggcccugaucaucugcaacgccaucaucgacccccugaucuacgccuuccacagccaggagcugagaagaacccugaaggaggugcugaccugcagcugguga

SEQ ID NO: 2838 - RNA, 954 nt, Artificial Sequence
  AAQ62970 variant
auggccgugcagggcagccagagaagacugcugggcagccugaacagcacccccaccgccaucccccagcugggccuggccgccaaccagaccggcgccagaugccuggaggugagcaucagcgacggccuguuccugagccugggccuggugagccugguggagaacgcccuggugguggccaccaucgccaagaacagaaaccugcacagccccauguacugcuucaucugcugccuggcccugcuggaccugcuggugagcggcagcaacgugcuggagaccgccgugauccugcugcuggaggccggcgcccugguggccagagccgccgugcugcagcagcuggacaacgugaucgacgugaucaccugcagcagcaugcugagcagccugugcuuccugggcgccaucgccguggacagauacaucagcaucuucuacgcccugagauaccacagcaucgugacccugcccagagccagaagagccguggccgccaucuggguggccagcgugguguucagcacccuguucaucgccuacuacgaccacguggccgugcugcugugccuggugguguucuuccuggccaugcuggugcugauggccgugcuguacgugcacaugcuggccagagccugccagcacgcccagggcaucgccagacugcacaagagacagagacccgugcaccagggcuucggccugaagggcgccgugacccugaccauccugcugggcaucuucuuccugugcuggggccccuucuuccugcaccugacccugaucgugcugugccccgagcaccccaccugcggcugcaucuucaagaacuucaaccuguuccuggcccugaucaucugcaacgccaucaucgacccccugaucuacgccuuccacagccaggagcugagaagaacccugaaggaggugcugaccugcagcugguga

SEQ ID NO: 2839 - RNA, 954 nt, Artificial Sequence
  AAQ62969 variant
auggccgugcagggcagccagagaagacugcugggcagccugaacagcacccccaccgccaucccccagcugggccuggccgccaaccagaccggcgccagaugccuggaggugagcaucagcgacggccugcugcugagccugggccuggugagccugguggagaacgcccuggugguggccaccaucgccaagaacagaaaccugcacagccccauguacugcuucaucugcugccuggcccugagcgaccugcuggugagcggcagcaacgugcuggagaccgccgugauccugcugcuggaggccggcgcccugguggccagagccgccgugcugcagcagcuggacaacgugaucgacgugaucaccugcagcagcaugcugagcagccugugcuuccugggcgccaucgccguggacagauacaucagcaucuucuacgcccugagauaccacagcaucgugacccugcccagagccagaagagccguggccgccaucuggguggccagcgugguguucagcacccuguucaucgccuacuacgaccacguggccgugcugcugugccuggugguguucuuccuggccaugcuggugcugauggccgugcuguacgugcacaugcuggccagagccugccagcacgcccagggcaucgccagacugcacaagagacagagacccgugcaccagggcuucggccugaagggcgccgugacccugaccauccugcugggcaucuucuuccugugcuggggccccuucuuccugcaccugacccugaucgugcugugccccgagcaccccaccugcggcugcaucuucaagaacuucaaccuguuccuggcccugaucaucugcaacgccaucaucgacccccugaucuacgccuuccacagccaggagcugagaagaacccugaaggaggugcugaccugcagcugguga

SEQ ID NO: 2840 - RNA, 954 nt, Artificial Sequence
  AAO21073 variant
auggccgugcagggcagccagagaagacugcugggcagccugaacagcacccccaccgccaucccccagcugggccuggccgccaaccagaccggcgccagaugccuggaggugagcaucagcgacggccuguuccugagccugggccuggugagccugguggagaacgcccuggugguggccaccaucgccaagaacagaaaccugcacagccccauguacugcuucaucugcugccuggcccugagcgaccugcuggugagcggcagcaacgugagagagaccgccgugauccugcugcuggaggccggcgcccugguggccagagccgccgugcugcagcagcuggacaacgugaucgacgugaucaccugcagcagcaugcugagcagccugugcuuccugggcgccaucgccguggacagauacaucagcaucuucuacgcccugagauaccacagcaucgugacccugcccagagccagaagagccguggccgccaucuggguggccagcgugguguucagcacccuguucaucgccuacuacgaccacguggccgugcugcugugccuggugguguucuuccuggccaugcuggugcugauggccgugcuguacgugcacaugcuggccagagccugccagcacgcccagggcaucgccagacugcacaagagacagagacccgugcaccagggcuucggccugaagggcgccgugacccugaccauccugcugggcaucuucuuccugugcuggggccccuucuuccugcaccugacccugaucgugcugugccccgagcaccccaccugcggcugcaucuucaagaacuucaaccuguuccuggcccugaucaucugcaacgccaucaucgacccccugaucuacgccuuccacagccaggagcugagaagaacccugaaggaggugcugaccugcagcugguga

SEQ ID NO: 2841 - RNA, 954 nt, Artificial Sequence
  AHC09567 variant
auggccgugcagggcagccagagaagacugcugggcagccugaacagcacccccaccgccaucccccagcugggccuggccgccaaccagaccggcgccagaugccuggaggugagcaucagcgacggccuguuccugagccugggccuggugagccugguggagaacgcccuggugguggccaccaucgccaagaacagaaaccugcacagccccauguacugcuucaucugcugccuggcccugcccgaccugcuggugagcggcagcaacgugcuggagaccgccgugauccugcugcuggaggccggcgcccugguggccagagccgccgugcugcagcagcuggacaacgugaucgacgugaucaccugcagcagcaugcugagcagccugugcuuccugggcgccaucgccguggacagauacaucagcaucuucuacgcccugagauaccacagcaucgugacccugcccagagccagaagagccguggccgccaucuggguggccagcgugguguucagcacccuguucaucgccuacuacgaccacguggccgugcugcugugccuggugguguucuuccuggccaugcuggugcugauggccgugcuguacgugcacaugcuggccagagccugccagcacgcccagggcaucgccagacugcacaagagacagagacccgugcaccagggcuucggccugaagggcgccgugacccugaccauccugcugggcaucuucuuccugugcuggggccccuucuuccugcaccugacccugaucgugcugugccccgagcaccccaccugcggcugcaucuucaagaacuucaaccuguuccuggcccugaucaucugcaacgccaucaucgacccccugaucuacgccuuccacagccaggagcugagaagaacccugaaggaggugcugaccugcagcugguga

SEQ ID NO: 2842 - RNA, 954 nt, Artificial Sequence
  AHC09812 variant
auggccgugcagggcagccagagaagacugcugggcagccugaacagcacccccaccgccaucccccagcugggccuggccgccaaccagaccggcgccagaugccuggaggugagcaucagcgacggccuguuccugagccugggccuggugagccugguggagaacgcccuggugguggccaccaucgccaagaacagaaaccugcacagccccauguacugcuucaucugcugccuggcccugagcgaccugcuggugagcggcagcaacgugcuggagaccgccgugauccugcugcuggaggccggcgcccugguggccagagccgccgugcugcagcagcuggacaacgugaucgacgugaucaccugcagcagcaugcugagcagccugugcuuccugggcgccaucgccguggacagauacaucagcaucuucuacgcccugagauaccacagcaucgugacccugcccagagccagaagagccguggccgccaucuggguggccagcgugguguucagcacccuguucaucgccuacuacgaccacguggccgugcugcugugccugaugguguucuuccuggccaugcuggugcugauggccgugcuguacgugcacaugcuggccagagccugccagcacgcccagggcaucgccagacugcacaagagacagagacccgugcaccagggcuucggccugaagggcgccgugacccugaccauccugcugggcaucuucuuccugugcuggggccccuucuuccugcaccugacccugaucgugcugugccccgagcaccccaccugcggcugcaucuucaagaacuucaaccuguuccuggcccugaucaucugcaacgccaucaucgacccccugaucuacgccuuccacagccaggagcugagaagaacccugaaggaggugcugaccugcagcugguga

SEQ ID NO: 2843 - RNA, 954 nt, Artificial Sequence
  AHC10192 variant
auggccgugcagggcagccagagaagacugcugggcagccugaacagcacccccaccgccaucccccagcugggccuggccgccaaccagaccggcgccagaugccuggaggugagcaucagcgacggccuguuccugagccugggccuggugagccugguggagaacgcccuggugguggccaccaucgccaagaacagaaaccugcacagccccauguacugcuucaucugcugccuggcccugagcgaccugcuggugagcggcagcaacgugcuggagaccgccgugauccugcugcuggaggccggcgcccugguggccagagccgccgugcugcagcagcuggacaacgugaucgacgugaucaccugcagcagcaugcugagcagccugugcuuccugggcgccaucgccguggacagauacaucagcaucuucuacgcccugagauaccacagcaucgugacccugcccagagccagaagagccguggccgccaucuggguggccagcgugguguucagcacccuguucaucgccuacuacgaccacguggccgugcugcugugccuggugguguucuuccuggccaugcuggugcugauggccgugcuguacgugcacaugcuggccagagccugccagcacgcccagggcaccgccagacugcacaagagacagagacccgugcaccagggcuucggccugaagggcgccgugacccugaccauccugcugggcaucuucuuccugugcuggggccccuucuuccugcaccugacccugaucgugcugugccccgagcaccccaccugcggcugcaucuucaagaacuucaaccuguuccuggcccugaucaucugcaacgccaucaucgacccccugaucuacgccuuccacagccaggagcugagaagaacccugaaggaggugcugaccugcagcugguga

SEQ ID NO: 2844 - RNA, 954 nt, Artificial Sequence
  AHC09641 variant
auggccgugcagggcagccagagaagacugcugggcagccugaacagcacccccaccgccaucccccagcugggccuggccgccaaccagaccggcgccagaugccuggaggugagcaucagcgacggccuguuccugagccugggccuggugagccugguggagaacgcccuggugguggccaccaucgccaagaacagaaaccugcacagccccauguacugcuucaucugcugccuggcccugagcgaccugcuggugagcggcagcaacgugcuggagaccgccgugauccugcugcuggaggccggcgcccugguggccagagccgccgugcugcagcagcuggacaacgugaucgacgugaucaccugcagcagcaugcugagcagccugugcuuccugggcgccaucgccguggacagauacaucagcaucuucuacgcccugagauaccacagcaccgugacccugcccagagccagaagagccguggccgccaucuggguggccagcgugguguucagcacccuguucaucgccuacuacgaccacguggccgugcugcugugccuggugguguucuuccuggccaugcuggugcugauggccgugcuguacgugcacaugcuggccagagccugccagcacgcccagggcaucgccagacugcacaagagacagagacccgugcaccagggcuucggccugaagggcgccgugacccugaccauccugcugggcaucuucuuccugugcuggggccccuucuuccugcaccugacccugaucgugcugugccccgagcaccccaccugcggcugcaucuucaagaacuucaaccuguuccuggcccugaucaucugcaacgccaucaucgacccccugaucuacgccuuccacagccaggagcugagaagaacccugaaggaggugcugaccugcagcugguga

SEQ ID NO: 2845 - RNA, 954 nt, Artificial Sequence
  AHC10044 variant
auggccgugcagggcagccagagaagacugcugggcagccugaacagcacccccaccgccaucccccagcugggccuggccgccaaccagaccggcgccagauaccuggaggugagcaucagcgacggccuguuccugagccugggccuggugagccugguggagaacgcccuggugguggccaccaucgccaagaacagaaaccugcacagccccauguacugcuucaucugcugccuggcccugagcgaccugcuggugagcggcagcaacgugcuggagaccgccgugauccugcugcuggaggccggcgcccugguggccagagccgccgugcugcagcagcuggacaacgugaucgacgugaucaccugcagcagcaugcugagcagccugugcuuccugggcgccaucgccguggacagauacaucagcaucuucuacgcccugagauaccacagcaucgugacccugcccagagccagaagagccguggccgccaucuggguggccagcgugguguucagcacccuguucaucgccuacuacgaccacguggccgugcugcugugccuggugguguucuuccuggccaugcuggugcugauggccgugcuguacgugcacaugcuggccagagccugccagcacgcccagggcaucgccagacugcacaagagacagagacccgugcaccagggcuucggccugaagggcgccgugacccugaccauccugcugggcaucuucuuccugugcuggggccccuucuuccugcaccugacccugaucgugcugugccccgagcaccccaccugcggcugcaucuucaagaacuucaaccuguuccuggcccugaucaucugcaacgccaucaucgacccccugaucuacgccuuccacagccaggagcugagaagaacccugaaggaggugcugaccugcagcugguga

SEQ ID NO: 2846 - RNA, 954 nt, Artificial Sequence
  AHC09532 variant
auggccgugcagggcagccagagaagacugcugggcagccugaacagcacccccaccgccaucccccagcugggccuggccgccaaccagaccggcgccagaugccuggaggugagcaucagcgacggccuguuccugagccugggccuggugagccugguggagaacgcccuggugcuggccaccaucgccaagaacagaaaccugcacagccccauguacugcuucaucugcugccuggcccugagcgaccugcuggugagcggcagcaacgugcuggagaccgccgugauccugcugcuggaggccggcgcccugguggccagagccgccgugcugcagcagcuggacaacgugaucgacgugaucaccugcagcagcaugcugagcagccugugcuuccugggcgccaucgccguggacagauacaucagcaucuucuacgcccugagauaccacagcaucgugacccugcccagagccagaagagccguggccgccaucuggguggccagcgugguguucagcacccuguucaucgccuacuacgaccacguggccgugcugcugugccuggugguguucuuccuggccaugcuggugcugauggccgugcuguacgugcacaugcuggccagagccugccagcacgcccagggcaucgccagacugcacaagagacagagacccgugcaccagggcuucggccugaagggcgccgugacccugaccauccugcugggcaucuucuuccugugcuggggccccuucuuccugcaccugacccugaucgugcugugccccgagcaccccaccugcggcugcaucuucaagaacuucaaccuguuccuggcccugaucaucugcaacgccaucaucgacccccugaucuacgccuuccacagccaggagcugagaagaacccugaaggaggugcugaccugcagcugguga

SEQ ID NO: 2847 - RNA, 954 nt, Artificial Sequence
  AHC11042 variant
auggccgugcagggcagccagagaagacugcugggcagccugaacagcacccccaccgccaucccccagcugggccuggccgccaaccagaccggcgccagaugccuggaggugagcaucagcgacggccuguuccugagccugggccuggugagccugguggagaacgcccuggugguggccaccaucgccaagaacagaaaccugcacagccccauguacugcuucaucugcugccugccccugagcgaccugcuggugagcggcagcaacgugcuggagaccgccgugauccugcugcuggaggccggcgcccugguggccagagccgccgugcugcagcagcuggacaacgugaucgacgugaucaccugcagcagcaugcugagcagccugugcuuccugggcgccaucgccguggacagauacaucagcaucuucuacgcccugagauaccacagcaucgugacccugcccagagccagaagagccguggccgccaucuggguggccagcgugguguucagcacccuguucaucgccuacuacgaccacguggccgugcugcugugccuggugguguucuuccuggccaugcuggugcugauggccgugcuguacgugcacaugcuggccagagccugccagcacgcccagggcaucgccagacugcacaagagacagagacccgugcaccagggcuucggccugaagggcgccgugacccugaccauccugcugggcaucuucuuccugugcuggggccccuucuuccugcaccugacccugaucgugcugugccccgagcaccccaccugcggcugcaucuucaagaacuucaaccuguuccuggcccugaucaucugcaacgccaucaucgacccccugaucuacgccuuccacagccaggagcugagaagaacccugaaggaggugcugaccugcagcugguga

SEQ ID NO: 2848 - RNA, 954 nt, Artificial Sequence
  AHC10733 variant
auggccgugcagggcagccagagaagacugcugggcagccugaacagcacccccaccgccaucccccagcugggccuggccgccaaccagaccggcgccagaugccuggaggugagcaucagcgacggccuguuccugagccugggccuggugagccugguggagaacgcccuggugguggccaccaucgccaagaacagaaaccugcacagccccauguacugcuucaucugcugccuggcccugagcgaccugcuggugagcggcagcaacgugcuggagaccgccgugauccugcugcuggaggccggcgcccugguggccagagccgccgugcugcagcagcuggacaacgugaucgacgugaucaccugcagcagcaugcugagcagccugugcuuccugggcgccaucgccguggacagauacaucagcaucuucuacgcccugagauaccacagcaucgugacccugcccagagccagaagagccguggccgccaucuggguggccagcgugguguucagcacccuguucaucgccuacuacgaccacguggccgugcugcugugccuggugguguucuuccuggccaugcuggugcugauggccgugcuguacgugcacaugcuggccagagccugccagcacgcccagggcaucgccagacugcacaagagacagagacccgugcaccagggcuucggccugaagggcgccgugacccugaccauccugcugggcaucuucuuccugugcuggggccccuucuuccugcaccugacccugaucgugcugugccccgagcaccccaccugcggcugcaucuucaagaacuucagccuguuccuggcccugaucaucugcaacgccaucaucgacccccugaucuacgccuuccacagccaggagcugagaagaacccugaaggaggugcugaccugcagcugguga

SEQ ID NO: 2849 - RNA, 954 nt, Artificial Sequence
  AHC10696 variant
auggccgugcagggcagccagagaagacugcugggcagccugaacagcacccccaccgccaucccccagcugggccuggccgccaaccagaccggcgccagaugccuggaggugagcaucagcgacggccuguuccugagccugggccuggugagccugguggagaacgcccuggugguggccaccaucgccaagaacagaaaccugcacagccccauguacugcuucaucugcugccuggcccugagcgaccugcuggugagcggcagcaacgugcuggagaccgccgugauccugcugcuggaggccggcgcccugguggccagagccgccgugcugcagcagcuggacaacgugaucgacgugaucaccugcagcagcaugcugagcagccugugcuuccugggcgccaucgccguggacagauacaucagcaucuucuacgcccugagauaccacagcaucgugacccugcccagagccagaagagccguggccgccaucuggguggccagcgugguguucagcacccuguucaucgccuacuacgaccacguggccgugcugcugugccuggugguguucuuccuggccaugcuggugcugauggccgugcuguacgugcacaugcuggccagagccugccagcacgcccagggcaucgccagacugcacaagagacagagacccgugcaccagggcuucggccugaagggcgccgugacccugaccauccugcugggcaucuucuuccugugcuggggccccuucuuccugcaccugacccugaucgugcugugccccgagcaccccaccugcggcugcaucuucaagaacuucaaccuguuccuggcccugaucaucugcaacgccaucaucgacccccugauccacgccuuccacagccaggagcugagaagaacccugaaggaggugcugaccugcagcugguga

SEQ ID NO: 2850 - RNA, 954 nt, Artificial Sequence
  AHC09527 variant
auggccgugcagggcagccagagaagacugcugggcagccugaacagcacccccaccgccaucccccagcugggccuggccgccaaccagaccggcgccagaugccuggaggugagcaucagcgacggccuguuccugagccugggccuggugagccugguggagaacgcccuggugguggccaccaucgccaagaacagaaaccugcacagccccauguacugcuucaucugcugccuggcccugagcgaccugcuggugagcggcagcaacgugcuggagaccgccgugauccugcugcuggaggccggcgcccugguggccagagccgccgugcugcagcagcuggacaacgugaucgacgugaucaccugcagcagcaugcugagcagccugugcuuccugggcgccaucgccguggacagauacaucagcaucuucuacgcccugagauaccacagcaucgugacccugcccagagccagaagagccguggccgccaucuggguggccagcgugguguucagcacccuguucaucgccuacuacgaccacguggccgugcugcugugccuggugguguucuuccuggccaugcuggugcugauggccgugcuguacgugcacaugcuggccagagccugccagcacgcccagggcaucgccagacugcacaagagacagagacccgugcaccagggcuucggccugaagggcgccgugacccugaccauccugcugggcaucuucuuccugugcuggggccccuucuuccugcaccugacccugaucgugcugugccccgagcaccccaccugcggcugcaucuucaagaacuucaaccuguuccuggcccugaucaucugcaacgccaucauccacccccugaucuacgccuuccacagccaggagcugagaagaacccugaaggaggugcugaccugcagcugguga

SEQ ID NO: 2851 - RNA, 954 nt, Artificial Sequence
  AHC10869 variant
auggccgugcagggcagccagagaagacugcugggcagccugaacagcacccccaccgccaucccccagcugggccuggccgccaaccagaccggcgccagaugccuggaggugagcaucagcgacggccuguuccugagccugggccuggugagccugguggagaacgcccuggugguggccaccaucgccaagaacagaaaccugcacagccccauguacugcuucaucugcugccuggcccugagcgaccugcuggugagcggcagcaacgugcuggagaccgccgugauccugcugcuggaggccggcgcccugguggccagagccgccgugcugcagcagcuggacaacgugaucgacgugaucaccugcagcagcaugcugagcagccugugcuuccugggcgccaucgccguggacagauacaucagcaucuucuacgcccugagauaccacagcaucgugacccugcccagagccagaagagccguggccgccaucuggguggccagcgugguguucagcacccuguucaucgccuacuacgaccacguggccgugcugcugugccuggugguguucuuccuggccaugcuggugcugauggccgugcuguacgugcacaugcuggccagagccugccagcacgcccagggcaucgccagacugcacaagagacagcaccccgugcaccagggcuucggccugaagggcgccgugacccugaccauccugcugggcaucuucuuccugugcuggggccccuucuuccugcaccugacccugaucgugcugugccccgagcaccccaccugcggcugcaucuucaagaacuucaaccuguuccuggcccugaucaucugcaacgccaucaucgacccccugaucuacgccuuccacagccaggagcugagaagaacccugaaggaggugcugaccugcagcugguga

SEQ ID NO: 2852 - RNA, 954 nt, Artificial Sequence
  AHC11615 variant
auggccgugcagggcagccagagaagacugcugggcagccugaacagcacccccaccgccaucccccagcugggccuggccgccaaccagaccggcgccagaugccuggaggugagcaucagcgacggccuguuccugagccugggccuggugagccugguggagaacgcccuggugguggccaccaucgccaagaacagaaaccugcacagccccauguacugcuucaucugcugccuggcccugagcgaccugcuggugagcggcagcaacgugcuggagaccgccgugauccugcugcuggaggccggcgcccugguggccagagccgccgugcugcagcagcuggacaacgugaucgacgugaucaccugcagcagcaugcugagcagccugugcuuccugggcgccaucgccguggacagauacaucagcaucuucuacgcccugagauaccacagcaucgugacccugcccagagccagaagagccguggccgccaucuggguggccagcgugguguucagcacccuguucaucgccuacuacgaccacguggccgugcugcugugccuggugguguucuuccuggccaugcuggugcugauggccgugcuguacgugcacaugcuggccagagccugccagcacgcccagggcaucgccagacugcacaagagacagagacccgugcaccagggcuucggccugaagggcgccgugacccugaccauccugcugggcaucuucuuccugugcuggggccccuucuuccugcaccugacccugaucgugcugugccccgagcaccccaccugcggcugcaucuucaagaacuucaaccuguuccugacccugaucaucugcaacgccaucaucgacccccugaucuacgccuuccacagccaggagcugagaagaacccugaaggaggugcugaccugcagcugguga

SEQ ID NO: 2853 - RNA, 954 nt, Artificial Sequence
  AHC09535 variant
auggccgugcagggcagccagagaagacugcugggcagccugaacagcacccccaccgccaucccccagcugggccuggccgccaaccagaccggcgccagaugccuggaggugagcaucagcgacggccuguuccugagccugggccuggugagccugguggagaacgcccuggugguggccaccaucgccaagaacagaaaccugcacagccccauguacugcuucaucugcugccuggcccugagcgaccugcuggugagcggcagcaacgugcuggagaccgccgugauccugcugcuggaggccggcgcccugguggccagagccgccgugcugcagcagcuggacaacgugaucgacgugaucaccugcagcagcaugcugagcagccugugcuuccugggcgccaucgccguggaccacuacaucagcaucuucuacgcccugagauaccacagcaucgugacccugcccagagccagaagagccguggccgccaucuggguggccagcgugguguucagcacccuguucaucgccuacuacgaccacguggccgugcugcugugccuggugguguucuuccuggccaugcuggugcugauggccgugcuguacgugcacaugcuggccagagccugccagcacgcccagggcaucgccagacugcacaagagacagagacccgugcaccagggcuucggccugaagggcgccgugacccugaccauccugcugggcaucuucuuccugugcuggggccccuucuuccugcaccugacccugaucgugcugugccccgagcaccccaccugcggcugcaucuucaagaacuucaaccuguuccuggcccugaucaucugcaacgccaucaucgacccccugaucuacgccuuccacagccaggagcugagaagaacccugaaggaggugcugaccugcagcugguga

SEQ ID NO: 2854 - RNA, 954 nt, Artificial Sequence
  AHC11840 variant
auggccgugcagggcagccagagaagacugcugggcagccugaacagcacccccaccgccaucccccagcugggccuggccgccaaccagaccggcgccagaugccuggaggugagcaucagcgacggccuguuccugagccugggccuggugagccugguggagaacgcccuggugguggccaccaucgccaagaacagaaaccugcacagccccauguacugcuucaucugcugccuggcccugagcgaccugcuggugagcggcagcaacgugcuggagaccgccgugauccugcugcuggaggccggcgcccugguggccagagccgccgugcugcagcagcuggacaacgugaucgacgugaucaccugcagcagcaugcugagcagccugugcuuccugggcgccaucgccguggacagauacaucagcaucuucuacgcccugagauaccacagcaucgugacccugcccagagccagaagagccguggccgccaucuggguggccagcgugguguucagcacccuguucaucgccuacuacgaccacguggccgugcugcugugccuggugguguucuuccuggccaugcuggugcugauggccgugcuguacgugcacaugcuggccagagccugccagcacgcccagggcaucgccagacugcacaagagacagagacccgugcaccagggcuucggccugaagggcgccgugacccugaccauccugcugggcaucuucuuccugugcuggggccccuucuuccugcaccugacccugaucgugcugugccccgagcaccccaccugcggcugcaucuucaagaacuucaaccuguuccuggcccugaucaucugcaacgccaucaucgacccccugaucuacgccuuccacaaccaggagcugagaagaacccugaaggaggugcugaccugcagcugguga

SEQ ID NO: 2855 - RNA, 954 nt, Artificial Sequence
  AHC09665 variant
auggccgugcagggcagccagagaagacugcugggcagccugaacagcacccccaccgccaucccccagcugggccuggccgccaaccagaccggcgccagaugccuggaggugagcaucagcgacggccuguuccugagccugggccuggugagccugguggagaacgcccuggugguggccaccaucgccaagaacagaaaccugcacagccccauguacugcuucaucugcugccuggcccugagcgaccugcuggugagcggcagcaacgugcuggagaccgccgugauccugcugcuggaggccggcgcccugguggccagagccgccgugcugcagcagcuggacaacgugaucgacaugaucaccugcagcagcaugcugagcagccugugcuuccugggcgccaucgccguggacagauacaucagcaucuucuacgcccugagauaccacagcaucgugacccugcccagagccagaagagccguggccgccaucuggguggccagcgugguguucagcacccuguucaucgccuacuacgaccacguggccgugcugcugugccuggugguguucuuccuggccaugcuggugcugauggccgugcuguacgugcacaugcuggccagagccugccagcacgcccagggcaucgccagacugcacaagagacagagacccgugcaccagggcuucggccugaagggcgccgugacccugaccauccugcugggcaucuucuuccugugcuggggccccuucuuccugcaccugacccugaucgugcugugccccgagcaccccaccugcggcugcaucuucaagaacuucaaccuguuccuggcccugaucaucugcaacgccaucaucgacccccugaucuacgccuuccacagccaggagcugagaagaacccugaaggaggugcugaccugcagcugguga

SEQ ID NO: 2856 - RNA, 954 nt, Artificial Sequence
  AHC11324 variant
auggccgugcagggcagccagagaagacugcugggcagccugaacagcacccccaccgccaucccccagcugggccuggccgccaaccagaccggcgccagaugccuggaggugagcaucagcgacggccuguuccugagccugggccuggugagccugguggagaacgcccuggugguggccaccaucgccaagaacagaaaccugcacagccccauguacugcuucaucugcugccuggcccugagcgaccugcuggugagcggcagcaacgugcuggagaccgccgugauccugcugcuggaggccggcgcccugguggccagagccgccgugcugcagcagcuggacaacgugaucgacgugaucaccugcagcagcaugcugagcagccugugcuuccugggcgccaucgccguggacagauacaucagcaucuucuacgcccugagauaccacagcaucgugacccugcccagagccagaagagccguggccgccaucuggguggccagcgugguguucagcacccuguucaucgccuacuacgaccacguggccgugcugcugugccuggugguguucuuccuggccaugcuggugcugauggccgugcuguacgugcacaugcuggccagagccugccagcacgcccagggcaucgccagacugcacaagagacagagacccgugcaccagggcuucggccugaagggcgccgugacccugaccauccugcugggcaucuucuuccugugcuggggccccuucuuccugcaccugacccugaucgugcugugccccgagcaccccaccugcggcugcaucuucaagaacuucaaccuguuccuggcccugaucaucagaaacgccaucaucgacccccugaucuacgccuuccacagccaggagcugagaagaacccugaaggaggugcugaccugcagcugguga

SEQ ID NO: 2857 - RNA, 954 nt, Artificial Sequence
  AHC09521 variant
auggccgugcagggcagccagagaagacugcugggcagccugaacagcacccccaccgccaucccccagcugggccuggccgccaaccagaccggcgccagaugccuggaggugagcaucagcgacggccuguuccugagccugggccuggugagccugguggagaacgcccuggugguggccaccaucgccaagaacagaaaccugcacagccccauguacugcuucaucugcugccuggcccugagcgaccugcuggugagcggcagcaacgugcuggagaccgccgugauccugcugcuggaggccggcgcccugguggccagagccgccgugcugcagcagcuggacaacgugaucgacgugaucaccugcagcagcaugcugagcagccugugcuuccugggcgccaucgccguggacagauacaucagcaucuucuacgcccugagauaccacagcaucgugacccugcccugggccagaagagccguggccgccaucuggguggccagcgugguguucagcacccuguucaucgccuacuacgaccacguggccgugcugcugugccuggugguguucuuccuggccaugcuggugcugauggccgugcuguacgugcacaugcuggccagagccugccagcacgcccagggcaucgccagacugcacaagagacagagacccgugcaccagggcuucggccugaagggcgccgugacccugaccauccugcugggcaucuucuuccugugcuggggccccuucuuccugcaccugacccugaucgugcugugccccgagcaccccaccugcggcugcaucuucaagaacuucaaccuguuccuggcccugaucaucugcaacgccaucaucgacccccugaucuacgccuuccacagccaggagcugagaagaacccugaaggaggugcugaccugcagcugguga

SEQ ID NO: 2858 - RNA, 954 nt, Artificial Sequence
  AHC11794 variant
auggccgugcagggcagccagagaagacugcugggcagccugaacagcacccccaccgccaucccccagcugggccuggccgccaaccagaccggcgccagaugccuggaggugagcaucagcgacggccuguuccugagccugggccuggugagccugguggagaacgcccuggugguggccaccaucgccaagaacagaaaccugcacagccccauguacugcuucaucugcugccuggcccugagcgaccugcuggugagcggcagcaacgugcuggagaccgccgugauccugcugcuggaggccggcgcccugguggccagagccgccgugcugcagcagcuggacaacgugaucgacgugaucaccugcagcagcaugcugagcagccugugcuuccugggcgccaucgccguggacagauacaucagcaucuucuacgcccugagauaccacagcaucgugacccugcccagagccagaagagccguggccgccaucuggguggccagcgugguguucagcacccuguucaucgccuacuacgaccacguggccgugcugcugugccuggugguguucuuccuggccaugcuggugcugauggccgugcuguacgugcacaugcuggccagagccugccagcacgcccagggcaucgccagacugcacaagagacagagacccgugcaccagggcuucggccugaagggcgccgugacccugaccauccugcugggcaucuucuuccugugcuggggccccuucuuccugcaccugacccugaucgugcugugccccgagcaccccgagugcggcugcaucuucaagaacuucaaccuguuccuggcccugaucaucugcaacgccaucaucgacccccugaucuacgccuuccacagccaggagcugagaagaacccugaaggaggugcugaccugcagcugguga

SEQ ID NO: 2859 - RNA, 954 nt, Artificial Sequence
  AHC10874 variant
auggccgugcagggcagccagagaagacugcugggcagccugaacagcacccccaccgccaucccccagcugggccuggccgccaaccagaccggcgccagaugccuggaggugagcaucagcgacggccuguuccugagccugggccuggugagccugguggagaacgcccuggugguggccaccaucgccaagaacagaaaccugcacagccccauguacugcuucaucugcugccuggcccugagcgagcugcuggugagcggcagcaacgugcuggagaccgccgugauccugcugcuggaggccggcgcccugguggccagagccgccgugcugcagcagcuggacaacgugaucgacgugaucaccugcagcagcaugcugagcagccugugcuuccugggcgccaucgccguggacagauacaucagcaucuucuacgcccugagauaccacagcaucgugacccugcccagagccagaagagccguggccgccaucuggguggccagcgugguguucagcacccuguucaucgccuacuacgaccacguggccgugcugcugugccuggugguguucuuccuggccaugcuggugcugauggccgugcuguacgugcacaugcuggccagagccugccagcacgcccagggcaucgccagacugcacaagagacagagacccgugcaccagggcuucggccugaagggcgccgugacccugaccauccugcugggcaucuucuuccugugcuggggccccuucuuccugcaccugacccugaucgugcugugccccgagcaccccaccugcggcugcaucuucaagaacuucaaccuguuccuggcccugaucaucugcaacgccaucaucgacccccugaucuacgccuuccacagccaggagcugagaagaacccugaaggaggugcugaccugcagcugguga

SEQ ID NO: 2860 - RNA, 954 nt, Artificial Sequence
  AHC09597 variant
auggccgugcagggcagccagagaagacugcugggcagccugaacagcacccccaccgccaucccccagcugggccuggccgccaaccagaccggcgccagaugccuggaggugagcaucagcgacggccuguuccugagccugggccuggugagccugguggagaacgcccuggugguggccaccaucgccaagaacagaaaccugcacagccccauguacugcuucaucugcugccuggcccugagcgaccugcuggugagcggcagcaacgugcuggagaccgccgugauccugcugcuggaggccggcgcccugguggccagagccgccgugcugcagcagcuggacaacgugaucgacgugaucaccugcagcagcaugcugagcagccugugcuuccugggcgccaucgccguggacagauacaucagcaucuucuacgcccugugcuaccacagcaucgugacccugcccagagccagaagagccguggccgccaucuggguggccagcgugguguucagcacccuguucaucgccuacuacgaccacguggccgugcugcugugccuggugguguucuuccuggccaugcuggugcugauggccgugcuguacgugcacaugcuggccagagccugccagcacgcccagggcaucgccagacugcacaagagacagagacccgugcaccagggcuucggccugaagggcgccgugacccugaccauccugcugggcaucuucuuccugugcuggggccccuucuuccugcaccugacccugaucgugcugugccccgagcaccccaccugcggcugcaucuucaagaacuucaaccuguuccuggcccugaucaucugcaacgccaucaucgacccccugaucuacgccuuccacagccaggagcugagaagaacccugaaggaggugcugaccugcagcugguga

SEQ ID NO: 2861 - RNA, 1665 nt, Artificial Sequence
  CCDS816.1 variant
augaccgcccccggcgccgccggcagaugcccccccaccaccuggcugggcagccugcugcugcuggugugccugcuggccagcagaagcaucaccgaggaggugagcgaguacugcagccacaugaucggcagcggccaccugcagagccugcagagacugaucgacagccagauggagaccagcugccagaucaccuucgaguucguggaccaggagcagcugaaggaccccgugugcuaccugaagaaggccuuccugcuggugcaggacaucauggaggacaccaugagauucagagacaacacccccaacgccaucgccaucgugcagcugcaggagcugagccugagacugaagagcugcuucaccaaggacuacgaggagcacgacaaggccugcgugagaaccuucuacgagaccccccugcagcugcuggagaaggugaagaacguguucaacgagaccaagaaccugcuggacaaggacuggaacaucuucagcaagaacugcaacaacagcuucgccgagugcagcagccaggacguggugaccaagcccgacugcaacugccuguaccccaaggccauccccagcagcgaccccgccagcgugagcccccaccagccccuggcccccagcauggcccccguggccggccugaccugggaggacagcgagggcaccgagggcagcagccugcugcccggcgagcagccccugcacaccguggaccccggcagcgccaagcagagaccccccagaagcaccugccagagcuucgagccccccgagacccccguggugaaggacagcaccaucggcggcagcccccagcccagacccagcgugggcgccuucaaccccggcauggaggacauccuggacagcgccaugggcaccaacugggugcccgaggaggccagcggcgaggccagcgagauccccgugccccagggcaccgagcugagccccagcagacccggcggcggcagcaugcagaccgagcccgccagacccagcaacuuccugagcgccagcagcccccugcccgccagcgccaagggccagcagcccgccgacgugaccggcaccgcccugcccagagugggccccgugagacccaccggccaggacuggaaccacaccccccagaagaccgaccaccccagcgcccugcugagagacccccccgagcccggcagccccagaaucagcagccugagaccccagggccugagcaaccccagcacccugagcgcccagccccagcugagcagaagccacagcagcggcagcgugcugccccugggcgagcuggagggcagaagaagcaccagagacagaagaagccccgccgagcccgagggcggccccgccagcgagggcgccgccagaccccugcccagauucaacagcgugccccugaccgacaccggccacgagagacagagcgagggcagcuucagcccccagcugcaggagagcguguuccaccugcuggugcccagcgugauccuggugcugcuggccgugggcggccugcuguucuacagauggagaagaagaagccaccaggagccccagagagccgacagcccccuggagcagcccgagggcagcccccugacccaggacgacagacagguggagcugcccguguga

SEQ ID NO: 2862 - RNA, 1893 nt, Artificial Sequence
  EAW85719 variant
auggcccugcccaccgccagaccccugcugggcagcugcggcacccccgcccugggcagccugcuguuccugcuguucagccugggcugggugcagcccagcagaacccuggccggcgagaccggccaggaggccgccccccuggacggcgugcuggccaacccccccaacaucagcagccugagccccagacagcugcugggcuuccccugcgccgaggugagcggccugagcaccgagagagugagagagcuggccguggcccuggcccagaagaacgugaagcugagcaccgagcagcugagaugccuggcccacagacugagcgagccccccgaggaccuggacgcccugccccuggaccugcugcuguuccugaaccccgacgccuucagcggcccccaggccugcaccagauucuucagcagaaucaccaaggccaacguggaccugcugcccagaggcgcccccgagagacagagacugcugcccgccgcccuggccugcuggggcgugagaggcagccugcugagcgaggccgacgugagagcccugggcggccuggccugcgaccugcccggcagauucguggccgagagcgccgaggugcugcugcccagacuggugagcugccccggcccccuggaccaggaccagcaggaggccgccagagccgcccugcagggcggcggcccccccuacggcccccccagcaccuggagcgugagcaccauggacgcccugagaggccugcugcccgugcugggccagcccaucaucagaagcaucccccagggcaucguggccgccuggagacagagaagcagcagagaccccagcuggagacagcccgagagaaccauccugagacccagauucagaagagagguggagaagaccgccugccccagcggcaagaaggccagagagaucgacgagagccugaucuucuacaagaagugggagcuggaggccugcguggacgccgcccugcuggccacccagauggacagagugaacgccauccccuucaccuacgagcagcuggacgugcugaagcacaagcuggacgagcuguacccccagggcuaccccgagagcgugauccagcaccugggcuaccuguuccugaagaugagccccgaggacaucagaaaguggaacgugaccagccuggagacccugaaggcccugcuggaggugaacaagggccacgagaugagcccccaggcccccagaagaccccugccccagguggccacccugaucgacagauucgugaagggcagaggccagcuggacaaggacacccuggacacccugaccgccuucuaccccggcuaccugugcagccugagccccgaggagcugagcagcgugccccccagcagcaucugggccgugagaccccaggaccuggacaccugcgaccccagacagcuggacgugcuguaccccaaggccagacuggccuuccagaacaugaacggcagcgaguacuucgugaagauccagagcuuccugggcggcgcccccaccgaggaccugaaggcccugagccagcagaacgugagcauggaccuggccaccuucaugaagcugagaaccgacgccgugcugccccugaccguggccgaggugcagaagcugcugggcccccacguggagggccugaaggccgaggagagacacagacccgugagagacuggauccugagacagagacaggacgaccuggacacccugggccugggccugcagggcggcauccccaacggcuaccuggugcuggaccugagcaugcaggaggcccugagcggcacccccugccugcugggccccggccccgugcugaccgugcuggcccugcugcuggccagcacccuggccuga

SEQ ID NO: 2863 - RNA, 1515 nt, Artificial Sequence
  CCDS46865.1 variant
auggaggcccugagagugcagauguucaugcccugcagcuucgagagccuguaccugagcagcgccgagcaccccggcgccagcaagccccccaucagcagcagcagcaugaccagcagaauccugcugagacagcagcugaugagagagcagaugcaggagcaggagagaagagagcagcagcagaagcugcaggccgcccaguucaugcagcagagagugcccgugagccagacccccgccaucaacgugagcgugcccaccacccugcccagcgccacccaggugcccauggaggugcugaaggugcagacccaccuggagaaccccaccaaguaccacauccagcaggcccagagacagcaggugaagcaguaccugagcaccacccuggccaacaagcacgccaaccaggugcugagccugcccugccccaaccagcccggcgaccacgugaugccccccgugcccggcagcagcgcccccaacagccccauggccaugcugacccugaacagcaacugcgagaaggagggcuucuacaaguucgaggagcagaacagagccgagagcgagugccccggcaugaacacccacagcagagccagcugcaugcagauggacgacgugaucgacgacaucaucagccuggagagcagcuacaacgaggagauccugggccugauggaccccgcccugcagauggccaacacccugcccgugagcggcaaccugaucgaccuguacggcaaccagggccugcccccccccggccugaccaucagcaacagcugccccgccaaccugcccaacaucaagagagagcugaccgagagcgaggccagagcccuggccaaggagagacagaagaaggacaaccacaaccugaucgagagaagaagaagauucaacaucaacgacagaaucaaggagcugggcacccugauccccaagagcaacgaccccgacaugagauggaacaagggcaccauccugaaggccagcguggacuacaucagaaagcugcagagagagcagcagagagccaaggagcuggagaacagacagaagaagcuggagcacgccaacagacaccugcugcugagaauccaggagcuggagaugcaggccagagcccacggccugagccugauccccagcaccggccugugcagccccgaccuggugaacagaaucaucaagcaggagcccgugcuggagaacugcagccaggaccugcugcagcaccacgccgaccugaccugcaccaccacccuggaccugaccgacggcaccaucaccuucaacaacaaccugggcaccggcaccgaggccaaccaggccuacagcgugcccaccaagaugggcagcaagcuggaggacauccugauggacgacacccugagccccgugggcgugaccgacccccugcugagcagcgugagccccggcgccagcaagaccagcagcagaagaagcagcaugagcauggaggagaccgagcacaccugcuga

SEQ ID NO: 2864 - RNA, 1260 nt, Artificial Sequence
  CCDS2913.1 variant
augcuggagaugcuggaguacaaccacuaccaggugcagacccaccuggagaaccccaccaaguaccacauccagcaggcccagagacagcaggugaagcaguaccugagcaccacccuggccaacaagcacgccaaccaggugcugagccugcccugccccaaccagcccggcgaccacgugaugccccccgugcccggcagcagcgcccccaacagccccauggccaugcugacccugaacagcaacugcgagaaggagggcuucuacaaguucgaggagcagaacagagccgagagcgagugccccggcaugaacacccacagcagagccagcugcaugcagauggacgacgugaucgacgacaucaucagccuggagagcagcuacaacgaggagauccugggccugauggaccccgcccugcagauggccaacacccugcccgugagcggcaaccugaucgaccuguacggcaaccagggccugcccccccccggccugaccaucagcaacagcugccccgccaaccugcccaacaucaagagagagcugaccgccugcaucuuccccaccgagagcgaggccagagcccuggccaaggagagacagaagaaggacaaccacaaccugaucgagagaagaagaagauucaacaucaacgacagaaucaaggagcugggcacccugauccccaagagcaacgaccccgacaugagauggaacaagggcaccauccugaaggccagcguggacuacaucagaaagcugcagagagagcagcagagagccaaggagcuggagaacagacagaagaagcuggagcacgccaacagacaccugcugcugagaauccaggagcuggagaugcaggccagagcccacggccugagccugauccccagcaccggccugugcagccccgaccuggugaacagaaucaucaagcaggagcccgugcuggagaacugcagccaggaccugcugcagcaccacgccgaccugaccugcaccaccacccuggaccugaccgacggcaccaucaccuucaacaacaaccugggcaccggcaccgaggccaaccaggccuacagcgugcccaccaagaugggcagcaagcuggaggacauccugauggacgacacccugagccccgugggcgugaccgacccccugcugagcagcgugagccccggcgccagcaagaccagcagcagaagaagcagcaugagcauggaggagaccgagcacaccugcuga

SEQ ID NO: 2865 - RNA, 1581 nt, Artificial Sequence
  XM_005264754 variant
augcagagcgagagcggcaucgugcccgacuucgaggugggcgaggaguuccacgaggagcccaagaccuacuacgagcugaagagccagccccugaagagcagcagcagcgccgagcaccccggcgccagcaagccccccaucagcagcagcagcaugaccagcagaauccugcugagacagcagcugaugagagagcagaugcaggagcaggagagaagagagcagcagcagaagcugcaggccgcccaguucaugcagcagagagugcccgugagccagacccccgccaucaacgugagcgugcccaccacccugcccagcgccacccaggugcccauggaggugcugaaggugcagacccaccuggagaaccccaccaaguaccacauccagcaggcccagagacagcaggugaagcaguaccugagcaccacccuggccaacaagcacgccaaccaggugcugagccugcccugccccaaccagcccggcgaccacgugaugccccccgugcccggcagcagcgcccccaacagccccauggccaugcugacccugaacagcaacugcgagaaggagggcuucuacaaguucgaggagcagaacagagccgagagcgagugccccggcaugaacacccacagcagagccagcugcaugcagauggacgacgugaucgacgacaucaucagccuggagagcagcuacaacgaggagauccugggccugauggaccccgcccugcagauggccaacacccugcccgugagcggcaaccugaucgaccuguacggcaaccagggccugcccccccccggccugaccaucagcaacagcugccccgccaaccugcccaacaucaagagagagcugaccgccugcaucuuccccaccgagagcgaggccagagcccuggccaaggagagacagaagaaggacaaccacaaccugaucgagagaagaagaagauucaacaucaacgacagaaucaaggagcugggcacccugauccccaagagcaacgaccccgacaugagauggaacaagggcaccauccugaaggccagcguggacuacaucagaaagcugcagagagagcagcagagagccaaggagcuggagaacagacagaagaagcuggagcacgccaacagacaccugcugcugagaauccaggagcuggagaugcaggccagagcccacggccugagccugauccccagcaccggccugugcagccccgaccuggugaacagaaucaucaagcaggagcccgugcuggagaacugcagccaggaccugcugcagcaccacgccgaccugaccugcaccaccacccuggaccugaccgacggcaccaucaccuucaacaacaaccugggcaccggcaccgaggccaaccaggccuacagcgugcccaccaagaugggcagcaagcuggaggacauccugauggacgacacccugagccccgugggcgugaccgacccccugcugagcagcgugagccccggcgccagcaagaccagcagcagaagaagcagcaugagcauggaggagaccgagcacaccugcuga

SEQ ID NO: 2866 - RNA, 1065 nt, Artificial Sequence
  BAG52140 variant
auggcccccgccgccuggcugagaagcgccgccgccagagcccugcugccccccaugcugcugcugcugcugcagccccccccccugcuggccagagcccugccccccgacgugcaccaccugcacgccgagagaagaggcccccagcccuggcacgccgcccugcccagcagccccgcccccgcccccgccacccaggaggcccccagacccgccagcagccugagaccccccagaugcggcgugcccgaccccagcgacggccugagcgccagaaacagacagaagagaauccugagauuccccuggcagcuggugcaggagcaggugagacagaccauggccgaggcccugaagguguggagcgacgugaccccccugaccuucaccgaggugcacgagggcagagccgacaucaugaucgacuucgccagauacuggcacggcgacgaccugcccuucgacggccccggcggcauccuggcccacgccuucuuccccaagacccacagagagggcgacgugcacuucgacuacgacgagaccuggaccaucggcgacgaccagggcaccgaccugcugcagguggccgcccacgaguucggccacgugcugggccugcagcacaccaccgccgccaaggcccugaugagcgccuucuacaccuucagauacccccugagccugagccccgacgacugcagaggcgugcagcaccuguacggccagcccuggcccaccgugaccagcagaacccccgcccugggcccccaggccggcaucgacaccaacgagaucgccccccuggagcccgacgccccccccgacgccugcgaggccagcuucgacgccgugagcaccaucagaggcgagcuguucuucuucaaggccggcuucguguggagacugagaggcggccagcugcagcccggcuaccccgcccuggccagcagacacuggcagggccugcccagccccguggacgccgccuucgaggacgcccagggccacaucugguucuuccagggcaccaccggcgugagcacccccgcccccggcguguga

SEQ ID NO: 2867 - RNA, 804 nt, Artificial Sequence
  AAV40839 variant
augagacugaccgugcugugcgccgugugccugcugcccggcagccuggcccugccccugccccaggaggccggcggcaugagcgagcugcagugggagcaggcccaggacuaccugaagagauucuaccuguacgacagcgagaccaagaacgccaacagccuggaggccaagcugaaggagaugcagaaguucuucggccugcccaucaccggcaugcugaacagcagagugaucgagaucaugcagaagcccagaugcggcgugcccgacguggccgaguacagccuguuccccaacagccccaaguggaccagcaagguggugaccuacagaaucgugagcuacaccagagaccugccccacaucaccguggacagacuggugagcaaggcccugaacauguggggcaaggagaucccccugcacuucagaaaggugguguggggcaccgccgacaucaugaucggcuucgccagaggcgcccacggcgacagcuaccccuucgacggccccggcaacacccuggcccacgccuucgcccccggcaccggccugggcggcgacgcccacuucgacgaggacgagagauggaccgacggcagcagccugggcaucaacuuccuguacgccgccacccacgagcugggccacagccugggcaugggccacagcagcgaccccaacgccgugauguaccccaccuacggcaacggcgacccccagaacuucaagcugagccaggacgacaucaagggcauccagaagcuguacggcaagagaagcaacagcagaaagaaguga

SEQ ID NO: 2868 - RNA, 3768 nt, Artificial Sequence
  J05582.1 variant
augacccccggcacccagagccccuucuuccugcugcugcugcugaccgugcugaccguggugaccggcagcggccacgccagcagcacccccggcggcgagaaggagaccagcgccacccagagaagcagcgugcccagcagcaccgagaagaacgccgugagcaugaccagcagcgugcugagcagccacagccccggcagcggcagcagcaccacccagggccaggacgugacccuggcccccgccaccgagcccgccagcggcagcgccgccaccuggggccaggacgugaccagcgugcccgugaccagacccgcccugggcagcaccaccccccccgcccacgacgugaccagcgcccccgacaacaagcccgcccccggcagcaccgccccccccgcccacggcgugaccagcgcccccgacaccagacccgcccccggcagcaccgccccccccgcccacggcgugaccagcgcccccgacaccagacccgcccccggcagcaccgccccccccgcccacggcgugaccagcgcccccgacaccagacccgcccccggcagcaccgccccccccgcccacggcgugaccagcgcccccgacaccagacccgcccccggcagcaccgccccccccgcccacggcgugaccagcgcccccgacaccagacccgcccccggcagcaccgccccccccgcccacggcgugaccagcgcccccgacaccagacccgcccccggcagcaccgccccccccgcccacggcgugaccagcgcccccgacaccagacccgcccccggcagcaccgccccccccgcccacggcgugaccagcgcccccgacaccagacccgcccccggcagcaccgccccccccgcccacggcgugaccagcgcccccgacaccagacccgcccccggcagcaccgccccccccgcccacggcgugaccagcgcccccgacaccagacccgcccccggcagcaccgccccccccgcccacggcgugaccagcgcccccgacaccagacccgcccccggcagcaccgccccccccgcccacggcgugaccagcgcccccgacaccagacccgcccccggcagcaccgccccccccgcccacggcgugaccagcgcccccgacaccagacccgcccccggcagcaccgccccccccgcccacggcgugaccagcgcccccgacaccagacccgcccccggcagcaccgccccccccgcccacggcgugaccagcgcccccgacaccagacccgcccccggcagcaccgccccccccgcccacggcgugaccagcgcccccgacaccagacccgcccccggcagcaccgccccccccgcccacggcgugaccagcgcccccgacaccagacccgcccccggcagcaccgccccccccgcccacggcgugaccagcgcccccgacaccagacccgcccccggcagcaccgccccccccgcccacggcgugaccagcgcccccgacaccagacccgcccccggcagcaccgccccccccgcccacggcgugaccagcgcccccgacaccagacccgcccccggcagcaccgccccccccgcccacggcgugaccagcgcccccgacaccagacccgcccccggcagcaccgccccccccgcccacggcgugaccagcgcccccgacaccagacccgcccccggcagcaccgccccccccgcccacggcgugaccagcgcccccgacaccagacccgcccccggcagcaccgccccccccgcccacggcgugaccagcgcccccgacaccagacccgcccccggcagcaccgccccccccgcccacggcgugaccagcgcccccgacaccagacccgcccccggcagcaccgccccccccgcccacggcgugaccagcgcccccgacaccagacccgcccccggcagcaccgccccccccgcccacggcgugaccagcgcccccgacaccagacccgcccccggcagcaccgccccccccgcccacggcgugaccagcgcccccgacaccagacccgcccccggcagcaccgccccccccgcccacggcgugaccagcgcccccgacaccagacccgcccccggcagcaccgccccccccgcccacggcgugaccagcgcccccgacaccagacccgcccccggcagcaccgccccccccgcccacggcgugaccagcgcccccgacaccagacccgcccccggcagcaccgccccccccgcccacggcgugaccagcgcccccgacaccagacccgcccccggcagcaccgccccccccgcccacggcgugaccagcgcccccgacaccagacccgcccccggcagcaccgccccccccgcccacggcgugaccagcgcccccgacaccagacccgcccccggcagcaccgccccccccgcccacggcgugaccagcgcccccgacaccagacccgcccccggcagcaccgccccccccgcccacggcgugaccagcgcccccgacaccagacccgcccccggcagcaccgccccccccgcccacggcgugaccagcgcccccgacaccagacccgcccccggcagcaccgccccccccgcccacggcgugaccagcgcccccgacaccagacccgcccccggcagcaccgccccccccgcccacggcgugaccagcgcccccgacaccagacccgcccccggcagcaccgccccccccgcccacggcgugaccagcgcccccgacaccagacccgcccccggcagcaccgccccccccgcccacggcgugaccagcgcccccgacaacagacccgcccugggcagcaccgccccccccgugcacaacgugaccagcgccagcggcagcgccagcggcagcgccagcacccuggugcacaacggcaccagcgccagagccaccaccacccccgccagcaagagcacccccuucagcauccccagccaccacagcgacacccccaccacccuggccagccacagcaccaagaccgacgccagcagcacccaccacagcagcgugcccccccugaccagcagcaaccacagcaccagcccccagcugagcaccggcgugagcuucuucuuccugagcuuccacaucagcaaccugcaguucaacagcagccuggaggaccccagcaccgacuacuaccaggagcugcagagagacaucagcgagauguuccugcagaucuacaagcagggcggcuuccugggccugagcaacaucaaguucagacccggcagcgugguggugcagcugacccuggccuucagagagggcaccaucaacgugcacgacguggagacccaguucaaccaguacaagaccgaggccgccagcagauacaaccugaccaucagcgacgugagcgugagcgacgugcccuuccccuucagcgcccagagcggcgccggcgugcccggcuggggcaucgcccugcuggugcuggugugcgugcugguggcccuggccaucguguaccugaucgcccuggccgugugccagugcagaagaaagaacuacggccagcuggacaucuuccccgccagagacaccuaccaccccaugagcgaguaccccaccuaccacacccacggcagauacgugccccccagcagcaccgacagaagccccuacgagaaggugagcgccggcaacggcggcagcagccugagcuacaccaaccccgccguggccgccgccagcgccaaccuguga

SEQ ID NO: 2869 - RNA, 2136 nt, Artificial Sequence
  NM_032853 variant
augauggccgacgccaaguacgugcugugcagaugggagaagagacuguggcccgccaaggugcuggccagaaccgccaccagcaccaagaacaagagaagaaaggaguacuuccuggccgugcagauccugagccuggaggagaagaucaaggugaagagcaccgagguggagauccuggagaagagccagaucgaggccaucgccagcagccuggccagccagaacgaggugcccgccgccccccuggaggagcuggccuacagaagaagccugagaguggcccuggacgugcugagcgagggcagcaucuggagccaggagagcagcgccggcaccggcagagccgacagaagccugagaggcaagcccauggagcacgugagcagccccugcgacagcaacagcagcagccugcccagaggcgacgugcugggcagcagcagaccccacagaagaagacccugcgugcagcagagccugagcagcagcuucaccugcgagaaggaccccgagugcaagguggaccacaagaagggccugagaaagagcgagaaccccagaggcccccuggugcugcccgccggcggcggcgcccaggacgagagcggcagcagaauccaccacaagaacuggacccuggccagcaagagaggcggcaacagcgcccagaaggccagccugugccugaacggcagcagccugagcgaggacgacaccgagagagacaugggcagcaagggcggcagcugggccgcccccagccugcccagcggcgugagagaggacgaccccugcgccaacgccgagggccacgaccccggccugccccugggcagccugaccgccccccccgcccccgagcccagcgccugcagcgagcccggcgagugccccgccaagaagagacccagacuggacggcagccagagaccccccgccgugcagcuggagcccauggccgccggcgccgcccccagccccggccccggccccggccccagagagagcgugacccccagaagcaccgccagacugggccccccccccagccacgccagcgccgacgccaccagaugccugcccugccccgacagccagaagcuggagaaggagugccagagcagcgaggagagcaugggcagcaacagcaugagaagcauccuggaggaggacgaggaggacgaggagccccccagagugcugcuguaccacgagcccagaagcuucgaggugggcaugcugguguggcacaagcacaagaaguaccccuucuggcccgccguggugaagagcgugagacagagagacaagaaggccagcgugcuguacaucgagggccacaugaaccccaagaugaagggcuucaccgugagccugaagagccugaagcacuucgacugcaaggagaagcagacccugcugaaccaggccagagaggacuucaaccaggacaucggcuggugcgugagccugaucaccgacuacagagugagacugggcugcggcagcuucgccggcagcuuccuggaguacuacgccgccgacaucagcuaccccgugagaaagagcauccagcaggacgugcugggcaccaagcugccccagcugagcaagggcagccccgaggagcccguggugggcugcccccugggccagagacagcccugcagaaagaugcugcccgacagaagcagagccgccagagacagagccaaccagaagcugguggaguacaucgugaaggccaagggcgccgagagccaccugagagccauccugaagagcagaaagcccagcagauggcugcagaccuuccugagcagcagccaguacgugaccugcguggagaccuaccuggaggacgagggccagcuggaccugguggugaaguaccugcagggcguguaccaggaggugggcgccaaggugcugcagagaaccaacggcgacagaaucagauucauccuggacgugcugcugcccgaggccaucaucugcgccaucagcgccguggacgagguggacuacaagaccgccgaggagaaguacaucaagggccccagccugagcuacagagagaaggagaucuucgacaaccagcugcuggaggagagaaacagaagaagaagauga

SEQ ID NO: 2870 - RNA, 438 nt, Artificial Sequence
  AAD44697 variant
augaccgugcacaaccuguaccuguucgacagaaacggcgugugccugcacuacagcgaguggcacagaaagaagcaggccggcauccccaaggaggaggaguacaagcugauguacggcaugcuguucagcaucagaagcuucgugagcaagaugagcccccuggacaugaaggacggcuuccuggccuuccagaccagcagauacaagcugcacuacuacgagacccccaccggcaucaagguggugaugaacaccgaccugggcgugggccccaucagagacgugcugcaccacaucuacagcgcccuguacguggagcugguggugaagaacccccugugcccccugggccagaccgugcagagcgagcuguucagaagcagacuggacagcuacgugagaagccugcccuucuucagcgccagagccggcuga

SEQ ID NO: 2871 - RNA, 1395 nt, Artificial Sequence
  AAH02712 variant
augcccagcugcagcaccagcaccaugcccggcaugaucugcaagaaccccgaccuggaguucgacagccugcagcccugcuucuaccccgacgaggacgacuucuacuucggcggccccgacagcaccccccccggcgaggacaucuggaagaaguucgagcugcugcccacccccccccugagccccagcagaggcuucgccgagcacagcagcgagccccccagcugggugaccgagaugcugcuggagaacgagcuguggggcagccccgccgaggaggacgccuucggccugggcggccugggcggccugacccccaaccccgugauccugcaggacugcauguggagcggcuucagcgccagagagaagcuggagagagccgugagcgagaagcugcagcacggcagaggcccccccaccgccggcagcaccgcccagagccccggcgccggcgccgccagccccgccggcagaggccacggcggcgccgccggcgccggcagagccggcgccgcccugcccgccgagcuggcccaccccgccgccgagugcguggaccccgccgugguguuccccuuccccgugaacaagagagagcccgcccccgugcccgccgcccccgccagcgcccccgccgccggccccgccguggccagcggcgccggcaucgccgcccccgccggcgcccccggcguggccccccccagacccggcggcagacagaccagcggcggcgaccacaaggcccugagcaccagcggcgaggacacccugagcgacagcgacgacgaggacgacgaggaggaggacgaggaggaggagaucgacguggugaccguggagaagagaagaagcagcagcaacaccaaggccgugaccaccuucaccaucaccgugagacccaagaacgccgcccugggccccggcagagcccagagcagcgagcugauccugaagagaugccugcccauccaccagcagcacaacuacgccgcccccagccccuacguggagagcgaggacgcccccccccagaagaagaucaagagcgaggccagccccagaccccugaagagcgugaucccccccaaggccaagagccugagccccagaaacagcgacagcgaggacagcgagagaagaagaaaccacaacauccuggagagacagagaagaaacgaccugagaagcagcuuccugacccugagagaccacgugcccgagcuggugaagaacgagaaggccgccaagguggugauccugaagaaggccaccgaguacgugcacagccugcaggccgaggagcaccagcugcugcuggagaaggagaagcugcaggccagacagcagcagcugcugaagaagaucgagcacgccagaaccugcuga

SEQ ID NO: 2872 - RNA, 3132 nt, Artificial Sequence
  AAC78645 variant
augccccugcuggagggcagcgugggcguggaggaccuggugcugcuggagccccugguggaggagagccugcugaagaaccugcagcugagauacgagaacaaggagaucuacaccuacaucggcaacguggugaucagcgugaaccccuaccagcagcugcccaucuacggccccgaguucaucgccaaguaccaggacuacaccuucuacgagcugaagccccacaucuacgcccuggccaacguggccuaccagagccugagagacagagacagagaccagugcauccugaucaccggcgagagcggcagcggcaagaccgaggccagcaagcuggugaugagcuacguggccgccgugugcggcaagggcgagcaggugaacagcgugaaggagcagcugcugcagagcaaccccgugcuggaggccuucggcaacgccaagaccaucagaaacaacaacagcagcagauucggcaaguacauggacaucgaguucgacuucaagggcagcccccugggcggcgugaucaccaacuaccugcuggagaagagcagacuggugaagcagcugaagggcgagagaaacuuccacaucuucuaccagcugcuggccggcgccgacgagcagcugcugaaggcccugaagcuggagagagacaccaccggcuacgccuaccugaaccacgaggugagcagaguggacggcauggacgacgccagcagcuucagagccgugcagagcgccauggccgugaucggcuucagcgaggaggagaucagacaggugcuggaggugaccagcauggugcugaagcugggcaacgugcugguggccgacgaguuccaggccagcggcauccccgccagcggcaucagagacggcagaggcgugagagagaucggcgagauggugggccugaacagcgaggagguggagagagcccugugcagcagaaccauggagaccgccaaggagaagguggugaccgcccugaacgugaugcaggcccaguacgccagagacgcccuggccaagaacaucuacagcagacuguucgacuggaucgugaacagaaucaacgagagcaucaaggugggcaucggcgagaagaagaaggugaugggcgugcuggacaucuacggcuucgagauccuggaggacaacagcuucgagcaguucgugaucaacuacugcaacgagaagcugcagcagguguucaucgagaugacccugaaggaggagcaggaggaguacaagagagagggcauccccuggaccaagguggacuacuucgacaacggcaucaucugcaagcugaucgagcacaaccagagaggcauccuggccaugcuggacgaggagugccugagacccggcguggugagcgacagcaccuuccuggccaagcugaaccagcuguucagcaagcacggccacuacgagagcaaggugacccagaacgcccagagacaguacgaccacaccaugggccugagcugcuucagaaucugccacuacgccggcaaggugaccuacaacgugaccagcuucaucgacaagaacaacgaccugcuguucagagaccugcugcaggccauguggaaggcccagcacccccugcugagaagccuguuccccgagggcaaccccaagcaggccagccugaagagaccccccaccgccggcgcccaguucaagagcagcguggccauccugaugaagaaccuguacagcaagagccccaacuacaucagaugcaucaagcccaacgagcaccagcagagaggccaguucagcagcgaccugguggccacccaggccagauaccugggccugcuggagaacgugagagugagaagagccggcuacgcccacagacagggcuacggccccuuccuggagagauacagacugcugagcagaagcaccuggccccacuggaacggcggcgacagagagggcguggagaaggugcugggcgagcugagcaugagcagcggcgagcuggccuucggcaagaccaagaucuucaucagaagccccaagacccuguucuaccuggaggagcagagaagacugagacugcagcagcuggccacccugauccagaagaucuacagaggcuggagaugcagaacccacuaccagcugaugagaaagagccagauccugaucagcagcugguucagaggcaacaugcagaagaagugcuacggcaagaucaaggccagcgugcugcugauccaggccuucgugagaggcuggaaggccagaaagaacuacagaaaguacuucagaagcgaggccgcccugacccuggccgacuucaucuacaagagcauggugcagaaguuccugcugggccugaagaacaaccugcccagcaccaacgugcuggacaagaccuggcccgccgcccccuacaagugccugagcaccgccaaccaggagcugcagcagcuguucuaccaguggaagugcaagagauucagagaccagcugagccccaagcagguggagauccugagagagaagcugugcgccagcgagcuguucaagggcaagaaggccagcuacccccagagcgugcccauccccuucugcggcgacuacaucggccugcagggcaaccccaagcugcagaagcugaagggcggcgaggagggccccgugcugauggccgaggccgugaagaaggugaacagaggcaacggcaagaccagcagcagaauccugcugcugaccaagggccacgugauccugaccgacaccaagaagagccaggccaagaucgugaucggccuggacaacguggccggcgugagcgugaccagccugaaggacggccuguucagccugcaccugagcgagaugagcagcgugggcagcaagggcgacuuccugcuggugagcgagcacgugaucgagcugcugaccaagauguacagagccgugcuggacgccacccagagacagcugaccgugaccgugaccgagaaguucagcgugagauucaaggagaacagcguggccgugaagguggugcagggccccgccggcggcgacaacagcaagcugagauacaagaagaagggcagccacugccuggaggugaccgugcaguga

SEQ ID NO: 2873 - RNA, 3411 nt, Artificial Sequence
  AAH53558 variant
auggccaagauggaggugaagaccagccugcuggacaacaugaucggcgugggcgacauggugcugcuggagccccugaacgaggagaccuucaucaacaaccugaagaagagauucgaccacagcgagaucuacaccuacaucggcagcguggugaucagcgugaaccccuacagaagccugcccaucuacagccccgagaagguggaggaguacagaaacagaaacuucuacgagcugagcccccacaucuucgcccugagcgacgaggccuacagaagccugagagaccaggacaaggaccagugcauccugaucaccggcgagagcggcgccggcaagaccgaggccagcaagcuggugaugagcuacguggccgccgugugcggcaagggcgccgaggugaaccaggugaaggagcagcugcugcagagcaaccccgugcuggaggccuucggcaacgccaagaccgugagaaacgacaacagcagcagauucggcaaguacauggacaucgaguucgacuucaagggcgacccccugggcggcgugaucagcaacuaccugcuggagaagagcagaguggugaagcagcccagaggcgagagaaacuuccacguguucuaccagcugcugagcggcgccagcgaggagcugcugaacaagcugaagcuggagagagacuucagcagauacaacuaccugagccuggacagcgccaaggugaacggcguggacgacgccgccaacuucagaaccgugagaaacgccaugcagaucgugggcuucauggaccacgaggccgagagcgugcuggccgugguggccgccgugcugaagcugggcaacaucgaguucaagcccgagagcagagugaacggccuggacgagagcaagaucaaggacaagaacgagcugaaggagaucugcgagcugaccggcaucgaccagagcgugcuggagagagccuucagcuucagaaccguggaggccaagcaggagaaggugagcaccacccugaacguggcccaggccuacuacgccagagacgcccuggccaagaaccuguacagcagacuguucagcuggcuggugaacagaaucaacgagagcaucaaggcccagaccaaggugagaaagaaggugaugggcgugcuggacaucuacggcuucgagaucuucgaggacaacagcuucgagcaguucaucaucaacuacugcaacgagaagcugcagcagaucuucaucgagcugacccugaaggaggagcaggaggaguacaucagagaggacaucgaguggacccacaucgacuacuucaacaacgccaucaucugcgaccugaucgagaacaacaccaacggcauccuggccaugcuggacgaggagugccugagacccggcaccgugaccgacgagaccuuccuggagaagcugaaccaggugugcgccacccaccagcacuucgagagcagaaugagcaagugcagcagauuccugaacgacaccagccugccccacagcugcuucagaauccagcacuacgccggcaaggugcuguaccagguggagggcuucguggacaagaacaacgaccugcuguacagagaccugagccaggccauguggaaggccagccacgcccugaucaagagccuguuccccgagggcaaccccgccaagaucaaccugaagagaccccccaccgccggcagccaguucaaggccagcguggccacccugaugaagaaccugcagaccaagaaccccaacuacaucagaugcaucaagcccaacgacaagaaggccgcccacaucuucaacgaggcccuggugugccaccagaucagauaccugggccugcuggagaacgugagagugagaagagccggcuacgccuucagacaggccuacgagcccugccuggagagauacaagaugcugugcaagcagaccuggccccacuggaagggccccgccagaagcggcguggaggugcuguucaacgagcuggagauccccguggaggaguacagcuucggcagaagcaagaucuucaucagaaaccccagaacccuguucaagcuggaggaccugagaaagcagagacuggaggaccuggccacccugauccagaagaucuacagaggcuggaagugcagaacccacuuccugcugaugaagaagagccagaucgugaucgccgccugguacagaagauacgcccagcagaagagauaccagcagaccaagagcagcgcccuggugauccagagcuacaucagaggcuggaaggccagaaagauccugagagagcugaagcaccagaagagaugcaaggaggccgugaccaccaucgccgccuacuggcacggcacccaggccagaagagagcugagaagacugaaggaggaggccagaaacaagcacgccaucgccgugaucugggccuacuggcugggcagcaaggccagaagagagcugaagagacugaaggaggaggccagaagaaagcacgccguggccgugaucugggccuacuggcugggccugaaggugagaagagaguacagaaaguucuucagagccaacgccggcaagaagaucuacgaguucacccugcagagaaucgugcagaaguacuuccuggagaugaagaacaagaugcccagccugagccccaucgacaagaacuggcccagcagacccuaccuguuccuggacagcacccacaaggagcugaagagaaucuuccaccuguggagaugcaagaaguacagagaccaguucaccgaccagcagaagcugaucuacgaggagaagcuggaggccagcgagcuguucaaggacaagaaggcccuguaccccagcagcgugggccagcccuuccagggcgccuaccuggagaucaacaagaaccccaaguacaagaagcugaaggacgccaucgaggagaagaucaucaucgccgagguggugaacaagaucaacagagccaacggcaagagcaccagcagaaucuuccugcugaccaacaacaaccugcugcuggccgaccagaagagcggccagaucaagagcgaggugccccugguggacgugaccaaggugagcaugagcagccagaacgacggcuucuucgccgugcaccugaaggagggcagcgaggccgccagcaagggcgacuuccuguucagcagcgaccaccugaucgagauggccaccaagcuguacagaaccacccugagccagaccaagcagaagcugaacaucgagaucagcgacgaguuccuggugcaguucagacaggacaaggugugcgugaaguucauccagggcaaccagaagaacggcagcgugcccaccugcaagagaaagaacaacagacugcuggagguggccgugcccuga

SEQ ID NO: 2874 - RNA, 3192 nt, Artificial Sequence
  CCDS42226.1 variant
auggcccugcagguggagcuggugcccaccggcgagaucaucagaguggugcacccccacagacccugcaagcuggcccugggcagcgacggcgugagagugaccauggagagcgcccugaccgccagagacagagugggcgugcaggacuucgugcugcuggagaacuucaccagcgaggccgccuucaucgagaaccugagaagaagauucagagagaaccugaucuacaccuacaucggccccgugcuggugagcgugaaccccuacagagaccugcagaucuacagcagacagcacauggagagauacagaggcgugagcuucuacgaggugcccccccaccuguucgccguggccgacaccguguacagagcccugagaaccgagagaagagaccaggccgugaugaucagcggcgagagcggcgccggcaagaccgaggccaccaagagacugcugcaguucuacgccgagaccugccccgcccccgagagaggcggcgccgugagagacagacugcugcagagcaaccccgugcuggaggccuucggcaacgccaagacccugagaaacgacaacagcagcagauucggcaaguacauggacgugcaguucgacuucaagggcgcccccgugggcggccacauccugagcuaccugcuggagaagagcagaguggugcaccagaaccacggcgagagaaacuuccacaucuucuaccagcugcuggagggcggcgaggaggagacccugagaagacugggccuggagagaaacccccagagcuaccuguaccuggugaagggccagugcgccaaggugagcagcaucaacgacaagagcgacuggaagguggugagaaaggcccugaccgugaucgacuucaccgaggacgagguggaggaccugcugagcaucguggccagcgugcugcaccugggcaacauccacuucgccgccaacgaggagagcaacgcccaggugaccaccgagaaccagcugaaguaccugaccagacugcugagcguggagggcagcacccugagagaggcccugacccacagaaagaucaucgccaagggcgaggagcugcugagcccccugaaccuggagcaggccgccuacgccagagacgcccuggccaaggccguguacagcagaaccuucaccuggcuggugggcaagaucaacagaagccuggccagcaaggacguggagagccccagcuggagaagcaccaccgugcugggccugcuggacaucuacggcuucgagguguuccagcacaacagcuucgagcaguucugcaucaacuacugcaacgagaagcugcagcagcuguucaucgagcugacccugaagagcgagcaggaggaguacgaggccgagggcaucgccugggagcccgugcaguacuucaacaacaagaucaucugcgaccugguggaggagaaguucaagggcaucaucagcauccuggacgaggagugccugagacccggcgaggccaccgaccugaccuuccuggagaagcuggaggacaccgugaagcaccacccccacuuccugacccacaagcuggccgaccagagaaccagaaagagccugggcagaggcgaguucagacugcugcacuacgccggcgaggugaccuacagcgugaccggcuuccuggacaagaacaacgaccugcuguucagaaaccugaaggagaccaugugcagcagcaagaaccccaucaugagccagugcuucgacagaagcgagcugagcgacaagaagagacccgagaccguggccacccaguucaagaugagccugcugcagcugguggagauccugcagagcaaggagcccgccuacgugagaugcaucaagcccaacgacgccaagcagcccggcagauucgacgaggugcugaucagacaccaggugaaguaccugggccugcuggagaaccugagagugagaagagccggcuucgccuacagaagaaaguacgaggccuuccugcagagauacaagagccugugccccgagaccuggcccaccugggccggcagaccccaggacggcguggccgugcuggugagacaccugggcuacaagcccgaggaguacaagaugggcagaaccaagaucuucaucagauuccccaagacccuguucgccaccgaggacgcccuggaggugagaagacagagccuggccaccaagauccaggccgccuggagaggcuuccacuggagacagaaguuccugagagugaagagaagcgccaucugcauccagagcugguggagaggcacccugggcagaagaaaggccgccaagagaaagugggccgcccagaccaucagaagacugaucagaggcuucgugcugagacacgcccccagaugccccgagaacgccuucuuccuggaccacgugagaaccagcuuccugcugaaccugagaagacagcugccccagaacgugcuggacaccagcuggcccacccccccccccgcccugagagaggccagcgagcugcugagagagcugugcaucaagaacaugguguggaaguacugcagaagcaucagccccgaguggaagcagcagcugcagcagaaggccguggccagcgagaucuucaagggcaagaaggacaacuacccccagagcgugcccagacuguucaucagcaccagacugggcaccgacgagaucagccccagagugcugcaggcccugggcagcgagcccauccaguacgccgugcccguggugaaguacgacagaaagggcuacaagcccagaagcagacagcugcugcugacccccaacgccguggugaucguggaggacgccaaggugaagcagagaaucgacuacgccaaccugaccggcaucagcgugagcagccugagcgacagccuguucgugcugcacgugcagagagccgacaacaagcagaagggcgacguggugcugcagagcgaccacgugaucgagacccugaccaagaccgcccugagcgccaacagagugaacagcaucaacaucaaccagggcagcaucaccuucgccggcggccccggcagagacggcaccaucgacuucacccccggcagcgagcugcugaucaccaaggccaagaacggccaccuggccgugguggcccccagacugaacagcagauga

SEQ ID NO: 2875 - RNA, 3021 nt, Artificial Sequence
  AAI46764 variant
auggccgagcaggagagccuggaguucggcaaggccgacuucgugcugauggacaccgugagcaugcccgaguucauggccaaccugagacugagauucgagaagggcagaaucuacaccuucaucggcgaggugguggugagcgugaaccccuacaagcugcugaacaucuacggcagagacaccaucgagcaguacaagggcagagagcuguacgagagacccccccaccuguucgccaucgccgacgccgccuacaaggccaugaagagaagaagcaaggacaccugcaucgugaucagcggcgagagcggcgccggcaagaccgaggccagcaaguacaucaugcaguacaucgccgccaucaccaaccccagccagagagccgagguggagagagugaagaacaugcugcugaagagcaacugcgugcuggaggccuucggcaacgccaagaccaacagaaacgacaacagcagcagauucggcaaguacauggacaucaacuucgacuucaagggcgaccccaucggcggccacaucaacaacuaccugcuggagaagagcagagugaucgugcagcagcccggcgagagaagcuuccacagcuucuaccagcugcugcagggcggcagcgagcagaugcugagaagccugcaccugcagaagagccugagcagcuacaacuacauccacgugggcgcccagcugaagagcagcaucaacgacgccgccgaguucagagugguggccgacgccaugaaggugaucggcuucaagcccgaggagauccagaccguguacaagauccuggccgccauccugcaccugggcaaccugaaguucgugguggacggcgacaccccccugaucgagaacggcaagguggugagcaucaucgccgagcugcugagcaccaagaccgacaugguggagaaggcccugcuguacagaaccguggccaccggcagagacaucaucgacaagcagcacaccgagcaggaggccagcuacggcagagacgccuucgccaaggccaucuacgagagacuguucugcuggaucgugaccagaaucaacgacaucaucgaggugaagaacuacgacaccaccauccacggcaagaacaccgugaucggcgugcuggacaucuacggcuucgagaucuucgacaacaacagcuucgagcaguucugcaucaacuacugcaacgagaagcugcagcagcuguucauccagcuggugcugaagcaggagcaggaggaguaccagagagagggcauccccuggaagcacaucgacuacuucaacaaccagaucaucguggaccugguggagcagcagcacaagggcaucaucgccauccuggacgacgccugcaugaacgugggcaaggugaccgacgagauguuccuggaggcccugaacagcaagcugggcaagcacgcccacuucagcagcagaaagcugugcgccagcgacaagauccuggaguucgacagagacuucagaaucagacacuacgccggcgacgugguguacagcgugaucggcuucaucgacaagaacaaggacacccuguuccaggacuucaagagacugauguacaacagcagcaaccccgugcugaagaacauguggcccgagggcaagcugagcaucaccgaggugaccaagagaccccugaccgccgccacccuguucaagaacagcaugaucgcccugguggacaaccuggccagcaaggagcccuacuacgugagaugcaucaagcccaacgacaagaagagcccccagaucuucgacgacgagagaugcagacaccagguggaguaccugggccugcuggagaacgugagagugagaagagccggcuucgccuucagacagaccuacgagaaguuccugcacagauacaagaugaucagcgaguucaccuggcccaaccacgaccugcccagcgacaaggaggccgugaagaagcugaucgagagaugcggcuuccaggacgacguggccuacggcaagaccaagaucuucaucagaacccccagaacccuguucacccuggaggagcugagagcccagaugcugaucagaaucgugcuguuccugcagaagguguggagaggcacccuggccagaaugagauacaagagaaccaaggccgcccugaccaucaucagauacuacagaagauacaaggugaagagcuacauccacgagguggccagaagauuccacggcgugaagaccaugagagacuacggcaagcacgugaaguggcccagcccccccaaggugcugagaagauucgaggaggcccugcagaccaucuucaacagauggagagccagccagcugaucaagagcauccccgccagcgaccugccccaggugagagccaagguggccgccguggagaugcugaagggccagagagccgaccugggccugcagagagccugggagggcaacuaccuggccagcaagcccgacaccccccagaccagcggcaccuucgugcccguggccaacgagcugaagagaaaggacaaguacaugaacgugcuguucagcugccacgugagaaaggugaacagauucagcaagguggaggacagagccaucuucgugaccgacagacaccuguacaagauggaccccaccaagcaguacaaggugaugaagaccaucccccuguacaaccugaccggccugagcgugagcaacggcaaggaccagcuggugguguuccacaccaaggacaacaaggaccugaucgugugccuguucagcaagcagcccacccacgagagcagaaucggcgagcuggugggcgugcuggugaaccacuucaagagcgagaagagacaccugcaggugaacgugaccaaccccgugcagugcagccugcacggcaagaagugcaccgugagcguggagaccagacugaaccagccccagcccgacuucaccaagaacagaagcggcuucauccugagcgugcccggcaacuga

SEQ ID NO: 2876 - RNA, 3327 nt, Artificial Sequence
  CCDS32254.1 variant
augggcagcaagggcguguaccaguaccacuggcagagccacaacgugaagcacagcggcguggacgacauggugcugcugagcaagaucaccgagaacagcaucguggagaaccugaagaagagauacauggacgacuacaucuucaccuacaucggcagcgugcugaucagcgugaaccccuucaagcagaugcccuacuucggcgagaaggagaucgagauguaccagggcgccgcccaguacgagaaccccccccacaucuacgcccuggccgacaacauguacagaaacaugaucaucgacagagagaaccagugcgugaucaucagcggcgagagcggcgccggcaagaccguggccgccaaguacaucaugagcuacaucagcagagugagcggcggcggcaccaaggugcagcacgugaaggacaucauccugcagagcaacccccugcuggaggccuucggcaacgccaagaccgugagaaacaacaacagcagcagauucggcaaguacuucgagauccaguucagccccggcggcgagcccgacggcggcaagaucagcaacuuccugcuggagaagagcagaguggugaugagaaaccccggcgagagaagcuuccacaucuucuaccagcugaucgagggcgccagcgccgagcagaagcacagccugggcaucaccagcauggacuacuacuacuaccugagccugagcggcagcuacaagguggacgacaucgacgacagaagagaguuccaggagacccugcacgccaugaacgugaucggcaucuucgccgaggagcagacccuggugcugcagaucguggccggcauccugcaccugggcaacaucagcuucaaggaggugggcaacuacgccgccguggagagcgaggaguuccuggccuuccccgccuaccugcugggcaucaaccaggacagacugaaggagaagcugaccagcagacagauggacagcaaguggggcggcaagagcgagagcauccacgugacccugaacguggagcaggccugcuacaccagagacgcccuggccaaggcccugcacgccagaguguucgacuuccugguggacagcaucaacaaggccauggagaaggaccacgaggaguacaacaucggcgugcuggacaucuacggcuucgagaucuuccagaagaacggcuucgagcaguucugcaucaacuucgugaacgagaagcugcagcagaucuucaucgagcugacccugaaggccgagcaggaggaguacgugcaggagggcaucagauggacccccaucgaguacuucaacaacaagaucgugugcgaccugaucgagaacaaggugaacccccccggcaucaugagcauccuggacgacgugugcgccaccaugcacgccgugggcgagggcgccgaccagacccugcugcagaagcugcagaugcagaucggcagccacgagcacuucaacagcuggaaccagggcuucaucauccaccacuacgccggcaaggugagcuacgacauggacggcuucugcgagagaaacagagacgugcuguucauggaccugaucgagcugaugcagagcagcgagcugcccuucaucaagagccuguuccccgagaaccugcaggccgacaagaagggcagacccaccaccgccggcagcaagaucaagaagcaggccaacgaccuggugagcacccugaugaagugcaccccccacuacaucagaugcaucaagcccaacgagaccaagaagcccagagacugggaggagagcagagugaagcaccagguggaguaccugggccugaaggagaacaucagagugagaagagccggcuacgccuacagaagaaucuuccagaaguuccugcagagauacgccauccugaccaaggccaccuggcccagcuggcagggcgaggagaagcagggcgugcugcaccugcugcagagcgugaacauggacagcgaccaguuccagcugggcagaagcaagguguucaucaaggcccccgagagccuguuccugcuggaggagaugagagagagaaaguacgacggcuacgccagagugauccagaagagcuggagaaaguucguggccagaaagaaguacgugcagaugagagaggaggccagcgaccugcugcugaacaagaaggagagaagaagaaacagcaucaacagaaacuucaucggcgacuacaucggcauggaggagcaccccgagcugcagcaguucgugggcaagagagagaagaucgacuucgccgacaccgugaccaaguacgacagaagauucaagggcgugaagagagaccugcugcugacccccaagugccuguaccugaucggcagagagaaggugaagcagggccccgacaagggccuggugaaggaggugcugaagagaaagaucgagaucgagagaauccugagcgugagccugagcaccaugcaggacgacaucuucauccugcacgagcaggaguacgacagccugcuggagagcguguucaagaccgaguuccugagccugcuggccaagagauacgaggagaagacccagaagcagcugccccugaaguucagcaacacccuggagcugaagcugaagaaggagaacuggggccccuggagcgccggcggcagcagacaggugcaguuccaccagggcuucggcgaccuggccgugcugaagcccagcaacaaggugcugcaggugagcaucggccccggccugcccaagaacagcagacccaccagaagaaacaccacccagaacaccggcuacagcagcggcacccagaacgccaacuaccccgugagagccgccccccccccccccggcuaccaccagaacggcgugaucagaaaccaguacgugcccuacccccacgcccccggcagccagagaagcaaccagaagagccuguacaccagcauggccagacccccccugcccagacagcagagcaccagcagcgacagagugagccagacccccgagagccuggacuuccugaaggugcccgaccagggcgccgccggcgugagaagacagaccaccagcagacccccccccgccggcggcagacccaagccccagcccaagcccaagccccaggugccccagugcaaggcccuguacgccuacgacgcccaggacaccgacgagcugagcuucaacgccaacgacaucaucgacaucaucaaggaggaccccagcggcugguggaccggcagacugagaggcaagcagggccuguuccccaacaacuacgugaccaagaucuga

SEQ ID NO: 2877 - RNA, 3297 nt, Artificial Sequence
  AAH28071 variant
augggcagcaaggagagauuccacuggcagagccacaacgugaagcagagcggcguggacgacauggugcugcugccccagaucaccgaggacgccaucgccgccaaccugagaaagagauucauggacgacuacaucuucaccuacaucggcagcgugcugaucagcgugaaccccuucaagcagaugcccuacuucaccgacagagagaucgaccuguaccagggcgccgcccaguacgagaaccccccccacaucuacgcccugaccgacaacauguacagaaacaugcugaucgacugcgagaaccagugcgugaucaucagcggcgagagcggcgccggcaagaccguggccgccaaguacaucaugggcuacaucagcaaggugagcggcggcggcgagaaggugcagcacgugaaggacaucauccugcagagcaacccccugcuggaggccuucggcaacgccaagaccgugagaaacaacaacagcagcagauucggcaaguacuucgagauccaguucagcagaggcggcgagcccgacggcggcaagaucagcaacuuccugcuggagaagagcagaguggugaugcagaacgagaacgagagaaacuuccacaucuacuaccagcugcuggagggcgccagccaggagcagagacagaaccugggccugaugacccccgacuacuacuacuaccugaaccagagcgacaccuaccagguggacggcaccgacgacagaagcgacuucggcgagacccugagcgccaugcaggugaucggcaucccccccagcauccagcagcuggugcugcagcugguggccggcauccugcaccugggcaacaucagcuucugcgaggacggcaacuacgccagaguggagagcguggaccugcuggccuuccccgccuaccugcugggcaucgacagcggcagacugcaggagaagcugaccagcagaaagauggacagcagauggggcggcagaagcgagagcaucaacgugacccugaacguggagcaggccgccuacaccagagacgcccuggccaagggccuguacgccagacuguucgacuuccugguggaggccaucaacagagccaugcagaagccccaggaggaguacagcaucggcgugcuggacaucuacggcuucgagaucuuccagaagaacggcuucgagcaguucugcaucaacuucgugaacgagaagcugcagcagaucuucaucgagcugacccugaaggccgagcaggaggaguacgugcaggagggcaucagauggacccccauccaguacuucaacaacaagguggugugcgaccugaucgagaacaagcugagcccccccggcaucaugagcgugcuggacgacgugugcgccaccaugcacgccaccggcggcggcgccgaccagacccugcugcagaagcugcaggccgccgugggcacccacgagcacuucaacagcuggagcgccggcuucgugauccaccacuacgccggcaaggugagcuacgacgugagcggcuucugcgagagaaacagagacgugcuguucagcgaccugaucgagcugaugcagaccagcgagcaggccuuccugagaaugcuguuccccgagaagcuggacggcgacaagaagggcagacccagcaccgccggcagcaagaucaagaagcaggccaacgaccugguggccacccugaugagaugcaccccccacuacaucagaugcaucaagcccaacgagaccaagagacccagagacugggaggagaacagagugaagcaccagguggaguaccugggccugaaggagaacaucagagugagaagagccggcuucgccuacagaagacaguucgccaaguuccugcagagauacgccauccugacccccgagaccuggcccagauggagaggcgacgagagacagggcgugcagcaccugcugagagccgugaacauggagcccgaccaguaccagaugggcagcaccaagguguucgugaagaaccccgagagccuguuccugcuggaggaggugagagagagaaaguucgacggcuucgccagaaccauccagaaggccuggagaagacacguggccgugagaaaguacgaggagaugagagaggaggccagcaacauccugcugaacaagaaggagagaagaagaaacagcaucaacagaaacuucgugggcgacuaccugggccuggaggagagacccgagcugagacaguuccugggcaagagagagagaguggacuucgccgacagcgugaccaaguacgacagaagauucaagcccaucaagagagaccugauccugacccccaagugcguguacgugaucggcagagagaaggugaagaagggccccgagaagggccaggugugcgaggugcugaagaagaagguggacauccaggcccugagaggcgugagccugagcaccagacaggacgacuucuucauccugcaggaggacgccgccgacagcuuccuggagagcguguucaagaccgaguucgugagccugcugugcaagagauucgaggaggccaccagaagaccccugccccugaccuucagcgacacccugcaguucagagugaagaaggagggcuggggcggcggcggcaccagaagcgugaccuucagcagaggcuucggcgaccuggccgugcugaaggugggcggcagaacccugaccgugagcgugggcgacggccugcccaagagcagcaagcccaccagaaagggcauggccaagggcaagcccagaagaagcagccaggcccccaccagagccgcccccgccccccccagaggcauggacagaaacggcgugccccccagcgccagaggcggcccccugccccuggagaucaugagcggcggcggcacccacagaccccccagaggcccccccagcaccagccugggcgccagcagaagacccagagccagaccccccagcgagcacaacaccgaguuccugaacgugcccgaccagggcauggccggcaugcagagaaagagaagcgugggccagagacccgugcccggcgugggcagacccaagccccagcccagaacccacggccccagaugcagagcccuguaccaguacgugggccaggacguggacgagcugagcuucaacgugaacgaggugaucgagauccugauggaggaccccagcggcugguggaagggcagacugcacggccaggagggccuguuccccggcaacuacguggagaagaucuga

SEQ ID NO: 2878 - RNA, 3057 nt, Artificial Sequence
  CCDS34629.1 variant
auggaggacgaggagggccccgaguacggcaagcccgacuucgugcugcuggaccaggugaccauggaggacuucaugagaaaccugcagcugagauucgagaagggcagaaucuacaccuacaucggcgaggugcuggugagcgugaaccccuaccaggagcugccccuguacggccccgaggccaucgccagauaccagggcagagagcuguacgagagacccccccaccuguacgccguggccaacgccgccuacaaggccaugaagcacagaagcagagacaccugcaucgugaucagcggcgagagcggcgccggcaagaccgaggccagcaagcacaucaugcaguacaucgccgccgugaccaaccccagccagagagccgagguggagagagugaaggacgugcugcugaagagcaccugcgugcuggaggccuucggcaacgccagaaccaacagaaaccacaacagcagcagauucggcaaguacauggacaucaacuucgacuucaagggcgaccccaucggcggccacauccacagcuaccugcuggagaagagcagagugcugaagcagcacgugggcgagagaaacuuccacgccuucuaccagcugcugagaggcagcgaggacaagcagcugcacgagcugcaccuggagagaaaccccgccguguacaacuucacccaccagggcgccggccugaacaugaccgugcacagcgcccuggacagcgacgagcagagccaccaggccgugaccgaggccaugagagugaucggcuucagccccgaggagguggagagcgugcacagaauccuggccgccauccugcaccugggcaacaucgaguucguggagaccgaggagggcggccugcagaaggagggccuggccguggccgaggaggcccugguggaccacguggccgagcugaccgccacccccagagaccuggugcugagaagccugcuggccagaaccguggccagcggcggcagagagcugaucgagaagggccacaccgccgccgaggccagcuacgccagagacgccugcgccaaggccguguaccagagacuguucgaguggguggugaacagaaucaacagcgugauggagcccagaggcagagaccccagaagagacggcaaggacaccgugaucggcgugcuggacaucuacggcuucgagguguuccccgugaacagcuucgagcaguucugcaucaacuacugcaacgagaagcugcagcagcuguucauccagcugauccugaagcaggagcaggaggaguacgagagagagggcaucaccuggcagagcguggaguacuucaacaacgccaccaucguggaccugguggagagaccccacagaggcauccuggccgugcuggacgaggccugcagcagcgccggcaccaucaccgacagaaucuuccugcagacccuggacaugcaccacagacaccaccugcacuacaccagcagacagcugugccccaccgacaagaccauggaguucggcagagacuucagaaucaagcacuacgccggcgacgugaccuacagcguggagggcuucaucgacaagaacagagacuuccuguuccaggacuucaagagacugcuguacaacagcaccgaccccacccugagagccauguggcccgacggccagcaggacaucaccgaggugaccaagagaccccugaccgccggcacccuguucaagaacagcaugguggcccugguggagaaccuggccagcaaggagcccuucuacgugagaugcaucaagcccaacgaggacaagguggccggcaagcuggacgagaaccacugcagacaccagguggccuaccugggccugcuggagaacgugagagugagaagagccggcuucgccagcagacagcccuacagcagauuccugcugagauacaagaugaccugcgaguacaccuggcccaaccaccugcugggcagcgacaaggccgccgugagcgcccugcuggagcagcacggccugcagggcgacguggccuucggccacagcaagcuguucaucagaagccccagaacccuggugacccuggagcagagcagagccagacugauccccaucaucgugcugcugcugcagaaggccuggagaggcacccuggccagauggagaugcagaagacugagagccaucuacaccaucaugagaugguucagaagacacaaggugagagcccaccuggccgagcugcagagaagauuccaggccgccagacagcccccccuguacggcagagaccugguguggccccugccccccgccgugcugcagcccuuccaggacaccugccacgcccuguucugcagauggagagccagacagcuggugaagaacaucccccccagcgacaugccccagaucaaggccaagguggccgccaugggcgcccugcagggccugagacaggacuggggcugcagaagagccugggccagagacuaccugagcagcgccaccgacaaccccaccgccagcagccuguucgcccagagacugaagacccugcaggacaaggacggcuucggcgccgugcuguucagcagccacgugagaaaggugaacagauuccacaagaucagaaacagagcccugcugcugaccgaccagcaccuguacaagcuggaccccgacagacaguacagagugaugagagccgugccccuggaggccgugaccggccugagcgugaccagcggcggcgaccagcugguggugcugcacgccagaggccaggacgaccugguggugugccugcacagaagcagacccccccuggacaacagagugggcgagcuggugggcgugcuggccgcccacugccagggcgagggcagaacccuggaggugagagugagcgacugcaucccccugagccacagaggcgugagaagacugaucagcguggagcccagacccgagcagcccgagcccgacuucagaugcgccagaggcagcuucacccugcuguggcccagcagauga

SEQ ID NO: 2879 - RNA, 3069 nt, Artificial Sequence
  CCDS53826.1 variant
auggagggcgcccugaccgccagagacaaggugggcgugcaggacuucgugcugcuggacgccuacaccagcgagagcgccuucguggacaaccugagaaagagauucagcgagaaccugaucuacaccuacaucggcacccugcuggugagcgugaaccccuaccaggagcugggcaucuacaccgugagccagauggagcuguaccagggcgugaacuucuucgagcugcccccccacguguacgccaucgccgacaacgccuacagaaugaugugcgccgagcugaacaaccacuucauccugaucagcggcgagagcggcgccggcaagaccgaggccagcaagaagauccuggaguacuucgccgugaccugccccaugacccagagccugcagaucgccagagacagacugcuguucagcaaccccgugcuggaggccuucggcaacgccagaacccugagaaacgacaacagcagcagauucggcaaguacauggacauccaguucgacuuccagggcauccccgugggcggccacaucaucagcuaccugaucgagaagagcagagugguguaccagaacgagggcgagagaaacuuccacaucuucuaccagcugcuggccggcggcgaggaggagagacugagcuaccugggccuggagagagacccccagcuguacaaguaccugagccagggccacugcgccaaggagagcagcaucagcgacaagaacgacuggaagaccgugagcaacgccuucagcgugaucgacuucaccgaggccgaccuggagaaccuguucggcaucaucgccagcgugcugcaccugggcaacaucggcuucgaggaggacgaccagggcugcgccaccauccccgacacccacgagaucaaguggaucgccaagcugcugggcgugcaccccagcgugcugcuggaggcccugacccacagaaagaucgaggccaagaccgaggaggugaucugcccccugacccuggagcugagcguguacgccagagacgccauggccaaggccguguacggcagaaccuucaccuggcuggugaacaagaucaacagcagccuggugaacaaggacuucaccagaaagaccgugaucggccugcuggacaucuacggcuucgagguguucgacaagaacggcuucgagcaguucugcaucaacuacugcaacgagaagcugcagcagcugcugaucgagagaacccugaaggccgagcaggccgaguacgagauggagggcaucgagugggagcccaucaaguacuucaacaacaagaucaucugcgaccugguggaggagagacacaagggcaucaucagcauccuggacgaggagugcaucagacccggccccgccaccgaccugagcuuccuggagaagcuggaggagaaggugggcaagcacgcccacuucgagaccagaaagcuggccggccccaagggcagaaagagaaucggcuggauggaguucagacugcugcacuacgccggcgaggugaccuacugcaccaagggcuuccuggagaagaacaacgaccugcuguacagacaccugaaggaggugcugugcaagagcaagaacaucauccugagagagugcuuccugcuggccgagcuggagaacagaagaagaccccccaccgugggcacccaguucaagaacagccugagcagccugcuggagacccugaucagcaaggagcccagcuacaucagaugcaucaagcccaacgacagaaaggagcccagcaaguucgacgacuuccugaucagacaccagaucaaguaccugggccugauggagcaccugagagugagaagagccggcuucgccuacagaagaaaguacgagcacuuccugcagagauacaagagccugugccccgacaccuggccccacuggcacggcccccccgccgagggcguggagagacugaucaaguacaucggcuacaagcccgaggaguacaagcugggcaagaccaagaucuucaucagauuccccagaacccuguucgccaccgaggacgccuucgaguucagcaagcaccagcugguggccagaauccaggccaccuacaagagaugccugggcagaagagaguacgugaagaagagacaggccgccaucaagcuggaggcccacuggagaggcgcccuggccagaaaggccauccagagaagaaagugggccgugagaaucaucagaaaguucaucaagggcuucaucagcagaaacaagccccugugccccgacaacgaggaguucaucguguucgugagaaagaacuacauccugaaccugagauaccaccugcccaagaccgugcuggacaagagcuggcugagaccccccggcauccuggagaacgccagcgaccugcugagaaagaugugcgugagaaaccuggugcagaaguacugcagaggcaucaccgccgagagaaaggccaugaugcagcagaagguggugaccagcgagaucuucagaggcagaaaggacggcuacaccgagagccugaaccagcccuucgugaacagcagaaucgacgagggcgacaucaaccccaaggugcugcagcugaucagccacgagaagauccaguacggcgugcccgugaucaaguacgacagaaagggcuucaaggccagacagagacagcugauccugacccagaaggccgccuacgugguggagcuggccaagaucaagcagaagaucgaguacagcgcccugaagggcgugagcaccagcaaccugagcgacggcauccuggugauccacgugagccccgaggacagcaagcagaagggcgacgccgugcugcagugcggccacguguucgaggccgugaccaagcuggugaugcuggugaagaaggagaacaucgugaacguggugcagggcagccugcaguucuucaucagccccggcaaggagggcaccaucguguucgacaccggccuggaggagcagguguacaagaacaagaacggccagcugaccguggugagcgugagaagaaagagcuga

SEQ ID NO: 2880 - RNA, 2379 nt, Artificial Sequence
  BAC84969 variant
augaucaccgugaaccccgacggcaagaucauggugagaagaugccuggugacccugagacccuucagacuguucgugcugggcaucggcuucuucacccugugcuuccugaugaccagccugggcggccaguucagcgccagaagacugggcgacagccccuucaccaucagaaccgaggugaugggcggccccgagagcagaggcgugcugagaaagaugagcgaccugcuggagcugauggugaagagaauggacgcccuggccagacuggagaacagcagcgagcugcacagagccggcggcgaccugcacuuccccgccgacagaaugccccccggcgccggccugauggagagaauccaggccaucgcccagaacgugagcgacaucgccgugaagguggaccagauccugagacacagccugcugcugcacagcaaggugagcgagggcagaagagaccagugcgaggcccccagcgaccccaaguuccccgacugcagcggcaagguggaguggaugagagccagauggaccagcgaccccugcuacgccuucuucggcguggacggcaccgagugcagcuuccugaucuaccugagcgagguggagugguucugccccccccugcccuggagaaaccagaccgccgcccagagagcccccaagccccugcccaaggugcaggccguguucagaagcaaccugagccaccugcuggaccugaugggcagcggcaaggagagccugaucuucaugaagaagagaaccaagagacugaccgcccagugggcccuggccgcccagagacuggcccagaagcugggcgccacccagagagaccagaagcagauccuggugcacaucggcuuccugaccgaggagagcggcgacguguucagccccagagugcugaagggcggcccccugggcgagauggugcagugggccgacauccugaccgcccuguacgugcugggccacggccugagagugaccgugagccugaaggagcugcagagcaaccugggcgugccccccggcagaggcagcugcccccugaccaugccccugcccuucgaccugaucuacaccgacuaccacggccugcagcagaugaagagacacaugggccugagcuucaagaaguacagaugcagaaucagagugaucgacaccuucggcaccgagcccgccuacaaccacgaggaguacgccacccugcacggcuacagaaccaacuggggcuacuggaaccugaaccccaagcaguucaugaccauguucccccacacccccgacaacagcuucaugggcuucgugagcgaggagcugaacgagaccgagaagagacugaucaagggcggcaaggccagcaacauggccgugguguacggcaaggaggccagcaucuggaagcugcagggcaaggagaaguuccugggcauccugaacaaguacauggagauccacggcaccguguacuacgagagccagagaccccccgaggugcccgccuucgugaagaaccacggccugcugccccagcccgaguuccagcagcugcugagaaaggccaagcuguucaucggcuucggcuuccccuacgagggccccgccccccuggaggccaucgccaacggcugcaucuuccugcagagcagauucagccccccccacagcagccugaaccacgaguucuucagaggcaagcccaccagcagagagguguucagccagcaccccuacgccgagaacuucaucggcaagccccacguguggaccguggacuacaacaacagcgaggaguucgaggccgccaucaaggccaucaugagaacccagguggaccccuaccugcccuacgaguacaccugcgagggcaugcuggagagaauccacgccuacauccagcaccaggacuucugcagagcccccgaccccgcccugcccgaggcccacgccccccagagccccuucgugcuggcccccaacgccacccaccuggagugggccagaaacaccagccuggcccccggcgccuggccccccgcccacgcccugagagccuggcuggccgugcccggcagagccugcaccgacaccugccuggaccacggccugaucugcgagcccagcuucuuccccuuccugaacagccaggacgccuuccugaagcugcaggugcccugcgacagcaccgagagcgagaugaaccaccuguaccccgccuucgcccagcccggccaggagugcuaccugcagaaggagccccugcuguucagcugcgccggcagcaacaccaaguacagaagacugugccccugcagagacuucagaaagggccagguggcccugugccagggcugccuguga

SEQ ID NO: 2881 - RNA, 36 nt, Artificial Sequence; identical to SEQ ID NO: 1369
  AF164963.1 variant

SEQ ID NO: 2882 - RNA, 2211 nt, Artificial Sequence
  AAI11702 variant
augaaggagaugagcgccaacaccgugcuggacagccagagacagcagaagcacuacggcaucaccagccccaucagccuggccagccccaaggagaucgaccacaucuacacccagaagcugaucgacgccaugaagcccuucggcguguucgaggacgaggaggagcugaaccacagacugguggugcugggcaagcugaacaaccuggugaaggaguggaucagcgacgugagcgagagcaagaaccugccccccagcgugguggccaccgugggcggcaagaucuucaccuucggcagcuacagacugggcgugcacaccaagggcgccgacaucgacgcccugugcguggcccccagacacguggagagaagcgacuucuuccagagcuucuucgagaagcugaagcaccaggacggcaucagaaaccugagagccguggaggacgccuucgugcccgugaucaaguucgaguucgacggcaucgagaucgaccugguguucgccagacuggccauccagaccaucagcgacaaccuggaccugagagacgacagcagacugagaagccuggacaucagaugcaucagaagccugaacggcugcagagugaccgacgagauccugcaccuggugcccaacaaggagaccuucagacugacccugagagccgugaagcugugggccaagagaagaggcaucuacagcaacaugcugggcuuccugggcggcgugagcugggccaugcugguggccagaaccugccagcuguaccccaacgccgccgccagcacccuggugcacaaguucuuccugguguucagcaagugggaguggcccaaccccgugcugcugaagcagcccgaggagagcaaccugaaccugcccgugugggaccccagagugaaccccagcgacagauaccaccugaugcccaucaucacccccgccuacccccagcagaacagcaccuacaacgugagcaccagcaccagaaccgugaugguggaggaguucaagcagggccuggccgugaccgacgagauccugcagggcaagagcgacuggagcaagcugcuggagccccccaacuucuuccagaaguacagacacuacaucgugcugaccgccagcgccagcaccgaggagaaccaccuggagugggugggccugguggagagcaagaucagagugcuggugggcaaccuggagagaaacgaguucaucacccuggcccacgugaacccccagagcuuccccggcaacaaggagcaccacaaggacaacaacuacgugagcaugugguuccugggcaucaucuucagaagaguggagaacgccgagagcgugaacaucgaccugaccuacgacauccagagcuucaccgacaccguguacagacaggccaacaacaucaacaugcugaaggagggcaugaagaucgaggccacccacgugaagaagaagcagcugcaccacuaccugcccgccgagauccugcagaagaagaagaagcagagccugagcgacgugaacagaagcagcggcggccugcagagcaagagacugagccuggacagcagcugccuggacagcagcagagacaccgacaacggcacccccuucaacagccccgccagcaagagcgacagccccagcgugggcgagaccgagagaaacagcgccgagcccgccgccgugaucguggagaagccccugagcgugccccccgcccagggccugagcauccccgugaucggcgccaagguggacagcaccgugaagaccgugagcccccccaccgugugcaccauccccaccguggugggcagaaacgugauccccagaaucaccaccccccacaaccccgcccagggccagccccaccugaacggcaugagcaacaucaccaagaccgugacccccaagagaagccacagccccagcaucgacggcacccccaagagacugaaggacguggagaaguucaucagacuggagagcaccuucaaggaccccagaaccgccgaggagagaaagagaaagagcguggacgccaucggcggcgagagcaugcccauccccaccaucgacaccagcagaaagaagagacugcccagcaaggagcugcccgacagcagcagccccgugcccgccaacaacaucagagugaucaagaacagcaucagacugacccugaacagauga

SEQ ID NO: 2883 - RNA, 1377 nt, Artificial Sequence
  AAG28389 variant
augagcaccgagggcggcuucggcggcaccagcagcagcgacgcccagcagagccugcagagcuucuggcccagagugauggaggagaucagaaaccugaccgugaaggacuucagagugcaggagcugccccuggccagaaucaagaagaucaugaagcuggacgaggacgugaagaugaucagcgccgaggcccccgugcuguucgccaaggccgcccagaucuucaucaccgagcugacccugagagccuggauccacaccgaggacaacaagagaagaacccugcagagaaacgacaucgccauggccaucaccaaguucgaccaguucgacuuccugaucgacaucgugcccagagacgagcugaagccccccaagagacaggaggaggugagacagagcgugacccccgccgagcccgugcaguacuacuucacccuggcccagcagcccaccgccgugcaggugcagggccagcagcagggccagcagaccaccagcagcaccaccaccauccagcccggccagaucaucaucgcccagccccagcagggccagaccacccccgugaccaugcaggugggcgagggccagcaggugcagaucgugcaggcccagccccagggccaggcccagcaggcccagagcggcaccggccagaccaugcaggugaugcagcagaucaucaccaacaccggcgagauccagcagauccccgugcagcugaacgccggccagcugcaguacaucagacuggcccagcccgugagcggcacccagguggugcagggccagauccagacccuggccaccaacgcccagcagggccagagaaacgccagccagggcaagcccagaagaugccugaaggagacccugcagaucacccagaccgaggugcagcagggccagcagcaguucagccaguucaccgacggccagagaaacagcgugcagcaggccagagugagcgagcugaccggcgaggccgagcccagagaggugaaggccaccggcaacagcacccccugcaccagcagccugcccaccacccacccccccagccacagagccggcgccagcugcgugugcugcagccagccccagcagagcagcaccagccccccccccagcgacgcccugcaguggguggugguggaggugagcggcacccccaaccagcuggagacccacagagagcugcacgccccccugcccggcaugaccagccugagcccccugcaccccagccagcagcuguaccagauccagcaggugaccaugcccgccggccaggaccuggcccagcccauguucauccagagcgccaaccagcccagcgacggccaggccccccaggugaccggcgacuga

SEQ ID NO: 2884 - RNA, 2802 nt, Artificial Sequence
  CCDS33423.1 variant
augagaauggccgccaccgccugggccggccugcagggccccccccugcccacccugugccccgccgugagaaccggccuguacugcagagaccaggcccacgccgagagaugggccaugaccagcgagaccagcagcggcagccacugcgccagaagcagaaugcugagaagaagagcccaggaggaggacagcaccgugcugaucgacgugagcccccccgaggccgagaagagaggcagcuacggcagcaccgcccacgccagcgagcccggcggccagcaggccgccgccugcagagccggcagccccgccaagcccagaaucgccgacuucgugcuggugugggaggaggaccugaagcuggacagacagcaggacagcgccgccagagacagaaccgacaugcacagaaccuggagagagaccuuccuggacaaccugagagccgccggccugugcguggaccagcaggacgugcaggacggcaacaccaccgugcacuacgcccugcugagcgccagcugggccgugcugugcuacuacgccgaggaccugagacugaagcugccccugcaggagcugcccaaccaggccagcaacuggagcgccggccugcuggccuggcugggcauccccaacgugcugcuggagguggugcccgacgugccccccgaguacuacagcugcagauucagagugaacaagcugcccagauuccugggcagcgacaaccaggacaccuucuucaccagcaccaagagacaccagauccuguucgagauccuggccaagacccccuacggccacgagaagaagaaccugcugggcauccaccagcugcuggccgagggcgugcugagcgccgccuucccccugcacgacggccccuucaagaccccccccgagggcccccaggcccccagacugaaccagagacaggugcuguuccagcacugggccagauggggcaaguggaacaaguaccagccccuggaccacgugagaagauacuucggcgagaagguggcccuguacuucgccuggcugggcuucuacaccggcuggcugcugcccgccgccguggugggcacccugguguuccuggugggcugcuuccugguguucagcgacauccccacccaggagcugugcggcagcaaggacagcuucgagaugugcccccugugccuggacugccccuucuggcugcugagcagcgccugcgcccuggcccaggccggcagacuguucgaccacggcggcaccguguucuucagccuguucauggcccugugggccgugcugcugcuggaguacuggaagagaaagagcgccacccuggccuacagaugggacugcagcgacuacgaggacaccgaggagagacccagaccccaguucgccgccagcgcccccaugaccgcccccaaccccaucaccggcgaggacgagcccuacuuccccgagagaagcagagccagaagaaugcuggccggcagcguggugaucguggugaugguggccgugguggugaugugccuggugagcaucauccuguacagagccaucauggccaucguggugagcagaagcggcaacacccugcuggccgccugggccagcagaaucgccagccugaccggcagcguggugaaccugguguucauccugauccugagcaagaucuacgugagccuggcccacgugcugaccagaugggagaugcacagaacccagaccaaguucgaggacgccuucacccugaagguguucaucuuccaguucgugaacuucuacagcagccccguguacaucgccuucuucaagggcagauucgugggcuaccccggcaacuaccacacccuguucggcgugagaaacgaggagugcgccgccggcggcugccugaucgagcuggcccaggagcugcuggugaucauggugggcaagcaggugaucaacaacaugcaggaggugcugauccccaagcugaagggcugguggcagaaguucagacugagaagcaagaagagaaaggccggcgccagcgccggcgccagccagggccccugggaggacgacuacgagcuggugcccugcgagggccuguucgacgaguaccuggagauggugcugcaguucggcuucgugaccaucuucguggccgccugcccccuggccccccuguucgcccugcugaacaacuggguggagaucagacuggacgccagaaaguucgugugcgaguacagaagacccguggccgagagagcccaggacaucggcaucugguuccacauccuggccggccugacccaccuggccgugaucagcaacgccuuccugcuggccuucagcagcgacuuccugcccagagccuacuacagauggaccagagcccacgaccugagaggcuuccugaacuucacccuggccagagcccccagcagcuucgccgccgcccacaacagaaccugcagauacagagccuucagagacgacgacggccacuacagccagaccuacuggaaccugcuggccaucagacuggccuucgugaucguguucgagcacgugguguucagcgugggcagacugcuggaccugcuggugcccgacauccccgagagcguggagaucaaggugaagagagaguacuaccuggccaagcaggcccuggccgagaacgaggugcuguucggcaccaacggcaccaaggacgagcagcccgagggcagcgagcugagcagccacuggacccccuucaccgugcccaaggccagccagcugcagcaguga

SEQ ID NO: 2885 - RNA, 885 nt, Artificial Sequence
  AAA36380 variant
auggaggacagcauggacauggacaugagcccccugagaccccagaacuaccuguucggcugcgagcugaaggccgacaaggacuaccacuucaagguggacaacgacgagaacgagcaccagcugagccugagaaccgugagccugggcgccggcgccaaggacgagcugcacaucguggaggccgaggccaugaacuacgagggcagccccaucaaggugacccuggccacccugaagaugagcgugcagcccaccgugagccugggcggcuucgagaucaccccccccguggugcugagacugaagugcggcagcggccccgugcacaucagcggccagcaccugguggccguggaggaggacgccgagagcgaggacgaggaggaggaggacgugaagcugcugagcaucagcggcaagagaagcgcccccggcggcggcagcaaggugccccagaagaaggugaagcuggccgccgacgaggacgacgacgacgacgacgaggaggacgacgacgaggacgacgacgacgacgacuucgacgacgaggaggccgaggagaaggcccccgugaagaagagcaucagagacacccccgccaagaacgcccagaagagcaaccagaacggcaaggacagcaagcccagcagcacccccagaagcaagggccaggagagcuucaagaagcaggagaagacccccaagacccccaagggccccagcagcguggaggacaucaaggccaagaugcaggccagcaucgagaagggcggcagccugcccaagguggaggccaaguucaucaacuacgugaagaacugcuucagaaugaccgaccaggaggccauccaggaccuguggcaguggagaaagagccuguga

SEQ ID NO: 2886 - RNA, 3915 nt, Artificial Sequence
  CCDS47686.1 variant
augcagcugaagaucaugcccaagaagaagagacugagcgccggcagagugccccugauccuguuccugugccagaugaucagcgcccuggaggugccccuggaccccaagcugcuggaggaccuggugcagccccccaccaucacccagcagagccccaaggacuacaucaucgaccccagagagaacaucgugauccagugcgaggccaagggcaagcccccccccagcuucagcuggaccagaaacggcacccacuucgacaucgacaaggacccccuggugaccaugaagcccggcaccggcacccugaucaucaacaucaugagcgagggcaaggccgagaccuacgagggcguguaccagugcaccgccagaaacgagagaggcgccgccgugagcaacaacaucguggugagacccagcagaagcccccuguggaccaaggagaagcuggagcccaucacccugcagagcggccagagccuggugcugcccugcagaccccccaucggccugcccccccccaucaucuucuggauggacaacagcuuccagagacugccccagagcgagagagugagccagggccugaacggcgaccuguacuucagcaacgugcugcccgaggacaccagagaggacuacaucugcuacgccagauucaaccacacccagaccauccagcagaagcagcccaucagcgugaaggugaucagcguggacgagcugaacgacaccaucgccgccaaccugagcgacaccgaguucuacggcgccaagagcagcagagagagaccccccaccuuccugacccccgagggcaacgccagcaacaaggaggagcugagaggcaacgugcugagccuggagugcaucgccgagggccugcccacccccaucaucuacugggccaaggaggacggcaugcugcccaagaacagaaccguguacaagaacuucgagaagacccugcagaucauccacgugagcgaggccgacagcggcaacuaccagugcaucgccaagaacgcccugggcgccauccaccacaccaucagcgugagagugaaggccgcccccuacuggaucaccgccccccagaaccuggugcugagccccggcgaggacggcacccugaucugcagagccaacggcaaccccaagcccagaaucagcuggcugaccaacggcgugcccaucgagaucgcccccgacgaccccagcagaaagaucgacggcgacaccaucaucuucagcaacgugcaggagagaagcagcgccguguaccagugcaacgccagcaacgaguacggcuaccugcuggccaacgccuucgugaacgugcuggccgagccccccagaauccugacccccgccaacacccuguaccaggugaucgccaacagacccgcccugcuggacugcgccuucuucggcagcccccugcccaccaucgagugguucaagggcgccaagggcagcgcccugcacgaggacaucuacgugcugcacgagaacggcacccuggagauccccguggcccagaaggacagcaccggcaccuacaccugcguggccagaaacaagcugggcauggccaagaacgaggugcaccuggagaucaaggaccccaccuggaucgugaagcagcccgaguacgccguggugcagagaggcagcauggugagcuucgagugcaaggugaagcacgaccacacccugagccugaccgugcuguggcugaaggacaacagagagcugcccagcgacgagagauucaccguggacaaggaccaccuggugguggccgacgugagcgacgacgacagcggcaccuacaccugcguggccaacaccacccuggacagcgugagcgccagcgccgugcugagcgugguggcccccacccccacccccgcccccguguacgacgugcccaacccccccuucgaccuggagcugaccgaccagcuggacaagagcgugcagcugagcuggacccccggcgacgacaacaacagccccaucaccaaguucaucaucgaguacgaggacgccaugcacaagcccggccuguggcaccaccagaccgaggugagcggcacccagaccaccgcccagcugaagcugagccccuacgugaacuacagcuucagagugauggccgugaacagcaucggcaagagccugcccagcgaggccagcgagcaguaccugaccaaggccagcgagcccgacaagaaccccaccgccguggagggccugggcagcgagcccgacaaccuggugaucaccuggaagccccugaacggcuucgagagcaacggccccggccugcaguacaaggugagcuggagacagaaggacggcgacgacgaguggaccagcguggugguggccaacgugagcaaguacaucgugagcggcacccccaccuucgugcccuaccugaucaaggugcaggcccugaacgacaugggcuucgcccccgagcccgccguggugaugggccacagcggcgaggaccugcccaugguggcccccggcaacgugagagugaacguggugaacagcacccuggccgaggugcacugggaccccgugccccugaagagcaucagaggccaccugcagggcuacagaaucuacuacuggaagacccagagcagcagcaagagaaacagaagacacaucgagaagaagauccugaccuuccagggcagcaagacccacggcaugcugcccggccuggagcccuucagccacuacacccugaacgugagaguggugaacggcaagggcgagggccccgccagccccgacagaguguucaacacccccgagggcgugcccagcgcccccagcagccugaagaucgugaaccccacccuggacagccugacccuggagugggacccccccagccaccccaacggcauccugaccgaguacacccugaaguaccagcccaucaacagcacccacgagcugggcccccugguggaccugaagauccccgccaacaagaccagauggacccugaagaaccugaacuucagcaccagauacaaguucuacuucuacgcccagaccagcgccggcagcggcagccagaucaccgaggaggccgugaccaccguggacgaggccggcauccugccccccgacgugggcgccggcaaggugcaggccgugaaccccagaaucagcaaccugaccgccgccgccgccgagaccuacgccaacaucagcugggaguacgagggccccgagcacgugaacuucuacguggaguacggcguggccggcagcaaggaggaguggagaaaggagaucgugaacggcagcagaagcuucuucggccugaagggccugaugcccggcaccgccuacaaggugagagugggcgccgugggcgacagcggcuucgugagcagcgaggacguguucgagaccggccccgccauggccagcagacagguggacaucgccacccagggcugguucaucggccugaugugcgccguggcccugcugauccugauccugcugaucgugugcuucaucagaagaaacaagggcggcaaguaccccgugaaggagaaggaggacgcccacgccgaccccgagauccagcccaugaaggaggacgacggcaccuucggcgaguacagcgacgccgaggaccacaagccccugaagaagggcagcagaacccccagcgacagaaccgugaagaaggaggacagcgacgacagccugguggacuacggcgagggcgugaacggccaguucaacgaggacggcagcuucaucggccaguacagcggcaagaaggagaaggagcccgccgagggcaacgagagcagcgaggcccccagccccgugaacgccaugaacagcuucguguga

SEQ ID NO: 2887 - RNA, 1305 nt, Artificial Sequence
  AAB51320 variant
augagcaucgagaagaucugggccagagagauccuggacagcagaggcaaccccaccguggagguggaccuguacaccgccaagggccuguucagagccgccgugcccagcggcgccagcaccggcaucuacgaggcccuggagcugagagacggcgacaagcagagauaccugggcaagggcgugcugaaggccguggaccacaucaacagcaccaucgcccccgcccugaucagcagcggccugagcgugguggagcaggagaagcuggacaaccugaugcuggagcuggacggcaccgagaacaagagcaaguucggcgccaacgccauccugggcgugagccuggccgugugcaaggccggcgccgccgagagagagcugccccuguacagacacaucgcccagcuggccggcaacagcgaccugauccugcccgugcccgccuucaacgugaucaacggcggcagccacgccggcaacaagcuggccaugcaggaguucaugauccugcccgugggcgccgagagcuucagagacgccaugagacugggcgccgagguguaccacacccugaagggcgugaucaaggacaaguacggcaaggacgccaccaacgugggcgacgagggcggcuucgcccccaacauccuggagaacagcgaggcccuggagcuggugaaggaggccaucgacaaggccggcuacaccgagaagaucgugaucggcauggacguggccgccagcgaguucuacagagacggcaaguacgaccuggacuucaagagccccaccgaccccagcagauacaucaccggcgaccagcugggcgcccuguaccaggacuucgugagagacuaccccguggugagcaucgaggaccccuucgaccaggacgacugggccgccuggagcaaguucaccgccaacgugggcauccagaucgugggcgacgaccugaccgugaccaaccccaagagaaucgagagagccguggaggagaaggccugcaacugccugcugcugaaggugaaccagaucggcagcgugaccgaggccauccaggccugcaagcuggcccaggagaacggcuggggcgugauggugagccacagaagcggcgagaccgaggacaccuucaucgccgaccugguggugggccugugcaccggccagaucaagaccggcgcccccugcagaagcgagagacuggccaaguacaaccagcugaugagaaucgaggaggagcugggcgacgaggccagauucgccggccacaacuucagaaaccccagcgugcuguga

SEQ ID NO: 2888 - RNA, 1395 nt, Artificial Sequence
  AAH08489 variant
auggagacccugagcuuccccagauacaacguggccgagaucgugauccacaucagaaacaagauccugaccggcgccgacggcaagaaccugaccaagaacgaccuguaccccaaccccaagcccgaggugcugcacaugaucuacaugagagcccugcagaucguguacggcaucagacuggagcacuucuacaugaugcccgugaacagcgaggugauguacccccaccugauggagggcuuccugcccuucagcaaccuggugacccaccuggacagcuuccugcccaucugcagagugaacgacuucgagaccgccgacauccugugccccaaggccaagagaaccagcagauuccugagcggcaucaucaacuucauccacuucagagaggccugcagagagaccuacauggaguuccuguggcaguacaagagcagcgccgacaagaugcagcagcugaacgccgcccaccaggaggcccugaugaagcuggagagacuggacagcgugcccguggaggagcaggaggaguucaagcagcugagcgacggcauccaggagcugcagcagagccugaaccaggacuuccaccagaagaccaucgugcugcaggagggcaacagccagaagaagagcaacaucagcgagaagaccaagagacugaacgagcugaagcugagcguggugagccugaaggagauccaggagagccugaagaccaagaucguggacagccccgagaagcugaagaacuacaaggagaagaugaaggacaccgugcagaagcugaagaacgccagacaggaggugguggagaaguacgagaucuacggcgacagcguggacugccugcccagcugccagcuggaggugcagcuguaccagaagaagauccaggaccugagcgacaacagagagaagcuggccagcauccugaaggagagccugaaccuggaggaccagaucgagagcgacgagagcgagcugaagaagcugaagaccgaggagaacagcuucaagagacugaugaucgugaagaaggagaagcuggccaccgcccaguucaagaucaacaagaagcacgaggacgugaagcaguacaagagaaccgugaucgaggacugcaacaaggugcaggagaagagaggcgccguguacgagagagugaccaccaucaaccaggagauccagaagaucaagcugggcauccagcagcugaaggacgccgccgagagagagaagcugaagagccaggagaucuuccugaaccugaagaccgcccuggagaaguaccacgacggcaucgagaaggccgccgaggacagcuacgccaagaucgacgagaagaccgccgagcugaagagaaagauguucaagaugagcaccuga

SEQ ID NO: 2889 - RNA, 543 nt, Artificial Sequence
  AAB49693 variant
augcaggccgagggcagaggcaccggcggcagcaccggcgacgccgacggccccggcggccccggcauccccgacggccccggcggcaacgccggcggccccggcgaggccggcgccaccggcggcagaggccccagaggcgccggcgccgccagagccagcggccccggcggcggcgcccccagaggcccccacggcggcgccgccagcggccugaacggcugcugcagaugcggcgccagaggccccgagagcagacugcuggaguucuaccuggccaugcccuucgccacccccauggaggccgagcuggccagaagaagccuggcccaggacgcccccccccugcccgugcccggcgugcugcugaaggaguucaccgugagcggcaacauccugaccaucagacugaccgccgccgaccacagacagcugcagcugagcaucagcagcugccugcagcagcugagccugcugauguggaucacccagugcuuccugcccguguuccuggcccagccccccagcggccagagaagauga

SEQ ID NO: 2890 - RNA, 1215 nt, Artificial Sequence
  CCDS14134.2 variant
auggccagccccagacugggcaccuucugcugccccaccagagacgccgccacccagcuggugcugagcuuccagcccagagccuuccacgcccugugccugggcagcggcggccugagacuggcccugggccugcugcagcugcugcccggcagaagacccgccggccccggcagccccgccaccagcccccccgccagcgugagaauccugagagccgccgccgccugcgaccugcugggcugccugggcauggugaucagaagcaccguguggcugggcuuccccaacuucguggacagcgugagcgacaugaaccacaccgagaucuggcccgccgccuucugcgugggcagcgccauguggauccagcugcuguacagcgccugcuucugguggcuguucugcuacgccguggacgccuaccuggugaucagaagaagcgccggccugagcaccauccugcuguaccacaucauggccuggggccuggccacccugcugugcguggagggcgccgccaugcuguacuaccccagcgugagcagaugcgagagaggccuggaccacgccaucccccacuacgugaccauguaccugccccugcugcuggugcugguggccaaccccauccuguuccagaagaccgugaccgccguggccagccugcugaagggcagacagggcaucuacaccgagaacgagagaagaaugggcgccgugaucaagaucagauucuucaagaucaugcuggugcugaucaucugcuggcugagcaacaucaucaacgagagccugcuguucuaccuggagaugcagaccgacaucaacggcggcagccugaagcccgugagaaccgccgccaagaccaccugguucaucaugggcauccugaaccccgcccagggcuuccugcugagccuggccuucuacggcuggaccggcugcagccugggcuuccagagccccagaaaggagauccagugggagagccugaccaccagcgccgccgagggcgcccaccccagcccccugaugccccacgagaaccccgccagcggcaaggugagccaggugggcggccagaccagcgacgaggcccugagcaugcugagcgagggcagcgacgccagcaccaucgagauccacaccgccagcgagagcugcaacaagaacgagggcgaccccgcccugcccacccacggcgaccuguga

SEQ ID NO: 2891 - RNA, 3141 nt, Artificial Sequence
  AAH38180 variant
auggccagcagcgugggcaacguggccgacagcaccgagcccaccaagagaaugcugagcuuccagggccuggccgagcuggcccacagagaguaccaggccggcgacuucgaggccgccgagagacacugcaugcagcuguggagacaggagcccgacaacaccggcgugcugcugcugcugagcagcauccacuuccagugcagaagacuggacagaagcgcccacuucagcacccuggccaucaagcagaacccccugcuggccgaggccuacagcaaccugggcaacguguacaaggagagaggccagcugcaggaggccaucgagcacuacagacacgcccugagacugaagcccgacuucaucgacggcuacaucaaccuggccgccgcccugguggccgccggcgacauggagggcgccgugcaggccuacgugagcgcccugcaguacaaccccgaccuguacugcgugagaagcgaccugggcaaccugcugaaggcccugggcagacuggaggaggccaaggccugcuaccugaaggccaucgagacccagcccaacuucgccguggccuggagcaaccugggcugcguguucaacgcccagggcgagaucuggcuggccauccaccacuucgagaaggccgugacccuggaccccaacuuccuggacgccuacaucaaccugggcaacgugcugaaggaggccagaaucuucgacagagccguggccgccuaccugagagcccugagccugagccccaaccacgccguggugcacggcaaccuggccugcguguacuacgagcagggccugaucgaccuggccaucgacaccuacagaagagccaucgagcugcagccccacuuccccgacgccuacugcaaccuggccaacgcccugaaggagaagggcagcguggccgaggccgaggacugcuacaacaccgcccugagacugugccccacccacgccgacagccugaacaaccuggccaacaucaagagagagcagggcaacaucgaggaggccgugagacuguacagaaaggcccuggagguguuccccgaguucgccgccgcccacagcaaccuggccagcgugcugcagcagcagggcaagcugcaggaggcccugaugcacuacaaggaggccaucagaaucagccccaccuucgccgacgccuacagcaacaugggcaacacccugaaggagaugcaggacgugcagggcgcccugcagugcuacaccagagccauccagaucaaccccgccuucgccgacgcccacagcaaccuggccagcauccacaaggacagcggcaacauccccgaggccaucgccagcuacagaaccgcccugaagcugaagcccgacuuccccgacgccuacugcaaccuggcccacugccugcagaucgugugcgacuggaccgacuacgacgagagaaugaagaagcuggugagcaucguggccgaccagcuggagaagaacagacugcccagcgugcacccccaccacagcaugcuguacccccugagccacggcuucagaaaggccaucgccgagagacacggcaaccugugccuggacaagaucaacgugcugcacaagccccccuacgagcaccccaaggaccugaagcugagcgacggcagacugagagugggcuacgugagcagcgacuucggcaaccaccccaccagccaccugaugcagagcauccccggcaugcacaaccccgacaaguucgagguguucugcuacgcccugagccccgacgacggcaccaacuucagagugaaggugauggccgaggccaaccacuucaucgaccugagccagauccccugcaacggcaaggccgccgacagaauccaccaggacggcauccacauccuggugaacaugaacggcuacaccaagggcgccagaaacgagcuguucgcccugagacccgcccccauccaggccauguggcugggcuaccccggcaccagcggcgcccuguucauggacuacaucaucaccgaccaggagaccagccccgccgagguggccgagcaguacagcgagaagcuggccuacaugccccacaccuucuucaucggcgaccacgccaacauguucccccaccugaagaagaaggccgugaucgacuucaagagcaacggccacaucuacgacaacagaaucgugcugaacggcaucgaccugaaggccuuccuggacagccugcccgacgugaagaucgugaagaugaagugccccgacggcggcgacaacgccgacagcagcaacaccgcccugaacaugcccgugauccccaugaacaccaucgccgaggccgugaucgagaugaucaacagaggccagauccagaucaccaucaacggcuucagcaucagcaacggccuggccaccacccagaucaacaacaaggccgccaccggcgaggaggugcccagaaccaucaucgugaccaccagaagccaguacggccugcccgaggacgccaucguguacugcaacuucaaccagcuguacaagaucgaccccagcacccugcagaugugggccaacauccugaagagagugcccaacagcgugcuguggcugcugagauuccccgccgugggcgagcccaacauccagcaguacgcccagaacaugggccugccccagaacagaaucaucuucagccccguggcccccaaggaggagcacgugagaagaggccagcuggccgacgugugccuggacaccccccugugcaacggccacaccaccggcauggacgugcugugggccggcacccccauggugaccaugcccggcgagacccuggccagcagaguggccgccagccagcugaccugccugggcugccuggagcugaucgccaagaacagacaggaguacgaggacaucgccgugaagcugggcaccgaccuggaguaccugaagaaggugagaggcaagguguggaagcagagaaucagcagcccccuguucaacaccaagcaguacaccauggagcuggagagacuguaccugcagaugugggagcacuacgccgccggcaacaagcccgaccacaugaucaagcccguggaggugaccgagagcgccuga

SEQ ID NO: 2892 - RNA, 441 nt, Artificial Sequence
  BAG57972 variant
auggccgccgagacccugcugagcagccugcugggccugcugcugcugggccugcugcugcccgccagccugaccggcggcgugggcagccugaaccuggaggagcugagcgagaugagauacggcaucgagauccugccccugcccgugaugggcggccagagccagagcagcgacguggugaucgugagcagcaaguacaagcagagauacgagugcagacugcccgugggcgccauccacuuccagagagagagagaggaggagacccccgccuaccagggccccggcauccccgagcugcugagccccaugagagacgcccccugccugcugaagaccaaggacugguggaccuacgaguucugcuacggcagacacauccagcaguaccacauggaggacagcgagaucaagggccugcaggccgccagcagcuga

SEQ ID NO: 2893 - RNA, 1221 nt, Artificial Sequence
  BAG65333 variant
auggccgccgagacccugcugagcagccugcugggccugcugcugcugggccugcugcugcccgccagccugaccggcggcgugggcagccugaaccuggaggagcugagcgagaugagauacggcaucgagauccugccccugcccgugaugggcggccagagccagagcagcgacguggugaucgugagcagcaaguacaagcagagauacgagugcagacugcccgccggcgccauccacuuccagagagagagagaggaggagacccccgccuaccagggccccggcauccccgagcugcugagccccaugagagacgcccccugccugcugaagaccaaggacugguggaccuacgaguucugcuacggcagacacauccagcaguaccacauggaggacagcgccagcggcgcccccaacgacuuccagaacaacgugcaggugaaggugaucagaagccccgccgaccugaucagauucaucgaggagcugaagggcggcaccaagaagggcaagcccaacaucggccaggagcagcccguggacgacgccgccgaggugccccagagagagcccgagaaggagagaggcgaccccgagagacagagagagauggaggaggaggaggacgaggacgaggacgaggacgaggacgaggacgagagacagcugcugggcgaguucgagaaggagcuggagggcauccugcugcccagcgacagagacagacugagaagcgaggugaaggccggcauggagagagagcuggagaacaucauccaggagaccgagaaggagcuggaccccgacggccugaagaaggagagcgagagagacagagccaugcuggcccugaccagcacccugaacaagcugaucaagagacuggaggagaagcagagccccgagcuggugaagaagcacaagaagaagagaguggugcccaagaagcccccccccagcccccagcccaccggcaagaucgagaucaagaucgugagacccugggccgagggcaccgaggagggcgccagauggcugaccgacgaggacaccagaaaccugaaggagaucuucuucaacauccuggugcccggcgccgaggaggcccagaaggagagacagagacagaaggagcuggagagcaacuacagaagaguguggggcagccccggcggcgagggcaccggcgaccuggacgaguucgacuucuga

SEQ ID NO: 2894 - RNA, 2223 nt, Artificial Sequence
  BAH13933 variant
auggccguggagacccugcugagcagccugcugggccugcugcugcugggccugcugcugcccgccagccugaccggcggcgugggcagccugaaccuggaggagcugagcgagaugagauacggcaucgagauccugccccugcccgugaugggcggccagagccagagcagcgacguggugaucgugagcagcaaguacaagcagagauacgagugcagacugcccgccggcgccauccacuuccagagagagagagaggaggagacccccgccuaccagggccccggcauccccgagcugcugagccccaugagagacgcccccugccugcugaagaccaaggacugguggaccuacgaguucugcuacggcagacacauccagcaguaccacauggaggacagcgagaucaagggcgaggugcuguaccugggcuacuaccagagcgccuucgacugggacgacgagaccgccaaggccagcaagcagcacagacugaagagauaccacagccagaccuacggcaacggcagcaagugcgaccugaacggcagacccagagaggccgaggugagauuccugugcgacgagggcgccggcaucagcggcgacuacaucgacagaguggacgagccccugagcugcagcuacgugcugaccaucagaacccccagacugugcccccacccccugcugagacccccccccagcgccgccccccaggccauccugugccaccccagccugcagcccgaggaguacauggccuacgugcagagacaggccgacagcaagcaguacggcgacaagaucaucgaggagcugcaggaccugggcccccagguguggagcgagaccaagagcggcguggccccccagaagauggccggcagaacccuguuccaccuguucagagagauccacuuccacuucuuccccagccccgaccugaccgugcugaccgacugguggggcggcggcggcguggagaaguaccacggccccagcagccugggcgacagaggcggcgagggcacccccagcuaccugcugcccagcgugagcccccugcugagcgaccagagccugcccgugcugugcacccugggcgccagccccaccaaggacgacagcaaggacagcgacuucuggaagaugcugaacgagcccgaggaccaggcccccggcggcgaggaggugcccgccgaggagcaggaccccagccccgaggccgccgacagcgccagcggcgcccccaacgacuuccagaacaacgugcaggugaaggugaucagaagccccgccgaccugaucagauucaucgaggagcugaagggcggcaccaagaagggcaagcccaacaucggccaggagcagcccguggacgacgccgccgaggugccccagagagagcccgagaaggagagaggcgaccccgagagacagagagagauggaggaggaggaggacgaggacgaggacgaggacgaggacgaggacgagagacagcugcugggcgaguucgagaaggagcuggagggcauccugcugcccagcgacagagacagacugagaagcgaggugaaggccggcauggagagagagcuggagaacaucauccaggagaccgagaaggagcuggaccccgacggccugaagaaggagagcgagagagacagagccaugcuggcccugaccagcacccugaacaagcugaucaagagacuggaggagaagcagagccccgagcuggugaagaagcacaagaagaagagaguggugcccaagaagcccccccccagcccccagcccaccgaggaggaccccgagcacagagugagagugagagugaccaagcugagacugggcggccccaaccaggaccugaccgugcuggagaugaagagagagaacccccagcugaagcagaucgagggccuggugaaggagcugcuggagagagagggccugaccgccgccggcaagaucgagaucaagaucgugagacccugggccgagggcaccgaggagggcgccagauggcugaccgacgaggacaccagaaaccugaaggagaucuucuucaacauccuggugcccggcgccgaggaggcccagaaggagagacagagacagaaggagcuggagagcaacuacagaagaguguggggcagccccggcggcgagggcaccggcgaccuggacgaguucgacuucuga

SEQ ID NO: 2895 - RNA, 2004 nt, Artificial Sequence
  AAB06495 variant
auggccgccgagacccugcugagcagccugcugggccugcugcugcugggccugcugcugcccgccagccugaccggcggcgugggcagccugaaccuggaggagcugagcgagaugagauacggcaucgagauccugccccugcccgugaugggcggccagagccagagcagcgacguggugaucgugagcagcaaguacaagcagagauacgagugcagacugcccgccggcgccauccacuuccagagagagagagaggaggagacccccgccuaccagggccccggcauccccgagcugcugagccccaugagagacgcccccugccugcugaagaccaaggacugguggaccuacgaguucugcuacggcagacacauccagcaguaccacauggaggacagcgagaucaagggcgaggugcuguaccugggcuacuaccagagcgccuucgacugggacgacgagaccgccaaggccagcaagcagcacagacugaagagauaccacagccagaccuacggcaacggcagcaagugcgaccugaacggcagacccagagaggccgaggugagauuccugugcgacgagggcgccggcaucagcggcgacuacaucgacagaguggacgagccccugagcugcagcuacgugcugaccaucagaacccccagacugugcccccacccccugcugagacccccccccagcgccgccccccaggccauccugugccaccccagccugcagcccgaggaguacauggccuacgugcagagacaggccgacagcaagcaguacggcgacaagaucaucgaggagcugcaggaccugggcccccagguguggagcgagaccaagagcggcguggccccccagaagauggccggcgccagccccaccaaggacgacagcaaggacagcgacuucuggaagaugcugaacgagcccgaggaccaggcccccggcggcgaggaggugcccgccgaggagcaggaccccagccccgaggccgccgacagcgccagcggcgcccccaacgacuuccagaacaacgugcaggugaaggugaucagaagccccgccgaccugaucagauucaucgaggagcugaagggcggcaccaagaagggcaagcccaacaucggccaggagcagcccguggacgacgccgccgaggugccccagagagagcccgagaaggagagaggcgaccccgagagacagagagagauggaggaggaggaggacgaggacgaggacgaggacgaggacgaggacgagagacagcugcugggcgaguucgagaaggagcuggagggcauccugcugcccagcgacagagacagacugagaagcgaggugaaggccggcauggagagagagcuggagaacaucauccaggagaccgagaaggagcuggaccccgacggccugaagaaggagagcgagagagacagagccaugcuggcccugaccagcacccugaacaagcugaucaagagacuggaggagaagcagagccccgagcuggugaagaagcacaagaagaagagaguggugcccaagaagcccccccccagcccccagcccaccgaggaggaccccgagcacagagugagagugagagugaccaagcugagacugggcggccccaaccaggaccugaccgugcuggagaugaagagagagaacccccagcugaagcagaucgagggccuggugaaggagcugcuggagagagagggccugaccgccgccggcaagaucgagaucaagaucgugagacccugggccgagggcaccgaggagggcgccagauggcugaccgacgaggacaccagaaaccugaaggagaucuucuucaacauccuggugcccggcgccgaggaggcccagaaggagagacagagacagaaggagcuggagagcaacuacagaagaguguggggcagccccggcggcgagggcaccggcgaccuggacgaguucgacuucuga

SEQ ID NO: 2896 - RNA, 303 nt, Artificial Sequence
  AAI13433 variant
augagagcccugacccugcuggcccugcuggcccuggccgcccugugcaucgccggccaggccggcgccaagcccagcggcgccgagagcagcaagggcgccgccuucgugagcaagcaggagggcagcgagguggugaagagacccagaagauaccuguaccaguggcugggcgcccccgugcccuaccccgacccccuggagcccagaagagaggugugcgagcugaaccccgacugcgacgagcuggccgaccacaucggcuuccaggaggccuacagaagauucuacggccccguguga

SEQ ID NO: 2897 - RNA, 945 nt, Artificial Sequence
  EAX06008 variant
augagaaucgccgugaucugcuucugccugcugggcaucaccugcgccauccccgugaagcaggccgacagcggcagcagcgaggagaagcagcuguacaacaaguaccccgacgccguggccaccuggcugaaccccgaccccagccagaagcagaaccugcuggccccccagaacgccgugagcagcgaggagaccaacgacuucaagcaggagacccugcccagcaagagcaacgagagccacgaccacauggacgacauggacgacgaggacgacgacgaccacguggacagccaggacagcaucgacagcaacgacagcgacgacguggacgacaccgacgacagccaccagagcgacgagagccaccacagcgacgagagcgacgagcuggugaccgacuuccccaccgaccugcccgccaccgagguguucacccccguggugcccaccguggacaccuacgacggcagaggcgacagcgugguguacggccugagaagcaagagcaagaaguucagaagacccgacauccaguaccccgacgccaccgacgaggacaucaccagccacauggagagcgaggagcugaacggcgccuacaaggccauccccguggcccaggaccugaacgcccccagcgacugggacagcagaggcaaggacagcuacgagaccagccagcuggacgaccagagcgccgagacccacagccacaagcagagcagacuguacaagagaaaggccaacgacgagagcaacgagcacagcgacgugaucgacagccaggagcugagcaaggugagcagagaguuccacagccacgaguuccacagccacgaggacaugcuggugguggaccccaagagcaaggaggaggacaagcaccugaaguucagaaucagccacgagcuggacagcgccagcagcgaggugaacuga

SEQ ID NO: 2898 - RNA, 903 nt, Artificial Sequence
  EAX06009 variant
augagaaucgccgugaucugcuucugccugcugggcaucaccugcgccauccccgugaagcaggccgacagcggcagcagcgaggagaagcagcuguacaacaaguaccccgacgccguggccaccuggcugaaccccgaccccagccagaagcagaaccugcuggccccccagacccugcccagcaagagcaacgagagccacgaccacauggacgacauggacgacgaggacgacgacgaccacguggacagccaggacagcaucgacagcaacgacagcgacgacguggacgacaccgacgacagccaccagagcgacgagagccaccacagcgacgagagcgacgagcuggugaccgacuuccccaccgaccugcccgccaccgagguguucacccccguggugcccaccguggacaccuacgacggcagaggcgacagcgugguguacggccugagaagcaagagcaagaaguucagaagacccgacauccaguaccccgacgccaccgacgaggacaucaccagccacauggagagcgaggagcugaacggcgccuacaaggccauccccguggcccaggaccugaacgcccccagcgacugggacagcagaggcaaggacagcuacgagaccagccagcuggacgaccagagcgccgagacccacagccacaagcagagcagacuguacaagagaaaggccaacgacgagagcaacgagcacagcgacgugaucgacagccaggagcugagcaaggugagcagagaguuccacagccacgaguuccacagccacgaggacaugcuggugguggaccccaagagcaaggaggaggacaagcaccugaaguucagaaucagccacgagcuggacagcgccagcagcgaggugaacuga

SEQ ID NO: 2899 - RNA, 864 nt, Artificial Sequence
  EAX06010 variant
augagaaucgccgugaucugcuucugccugcugggcaucaccugcgccauccccgugaagcaggccgacagcggcagcagcgaggagaagcagaacgccgugagcagcgaggagaccaacgacuucaagcaggagacccugcccagcaagagcaacgagagccacgaccacauggacgacauggacgacgaggacgacgacgaccacguggacagccaggacagcaucgacagcaacgacagcgacgacguggacgacaccgacgacagccaccagagcgacgagagccaccacagcgacgagagcgacgagcuggugaccgacuuccccaccgaccugcccgccaccgagguguucacccccguggugcccaccguggacaccuacgacggcagaggcgacagcgugguguacggccugagaagcaagagcaagaaguucagaagacccgacauccaguaccccgacgccaccgacgaggacaucaccagccacauggagagcgaggagcugaacggcgccuacaaggccauccccguggcccaggaccugaacgcccccagcgacugggacagcagaggcaaggacagcuacgagaccagccagcuggacgaccagagcgccgagacccacagccacaagcagagcagacuguacaagagaaaggccaacgacgagagcaacgagcacagcgacgugaucgacagccaggagcugagcaaggugagcagagaguuccacagccacgaguuccacagccacgaggacaugcuggugguggaccccaagagcaaggaggaggacaagcaccugaaguucagaaucagccacgagcuggacagcgccagcagcgaggugaacuga

SEQ ID NO: 2900 - RNA, 984 nt, Artificial Sequence
  BAH12087 variant
augggcaucgugcccagaagccuggacaagaaggcccacagagugcaguuccagcugaacagaaucaaggccaagaucgagcugcccuggggcagccugcagcuggacugccugaugaagacccugaaggagcuguacaacaaguaccccgacgccguggccaccuggcugaaccccgaccccagccagaagcagaaccugcuggccccccagaacgccgugagcagcgaggagaccaacgacuucaagcaggagacccugcccagcaagagcaacgagagccacgaccacauggacgacauggacgacgaggacgacgacgaccacguggacagccaggacagcaucgacagcaacgacagcgacgacguggacgacaccgacgacagccaccagagcgacgagagccaccacagcgacgagagcgacgagcuggugaccgacuuccccaccgaccugcccgccaccgagguguucacccccguggugcccaccguggacaccuacgacggcagaggcgacagcgugguguacggccugagaagcaagagcaagaaguucagaagacccgacauccaguaccccgacgccaccgacgaggacaucaccagccacauggagagcgaggagcugaacggcgccuacaaggccauccccguggcccaggaccugaacgcccccagcgacugggacagcagaggcaaggacagcuacgagaccagccagcuggacgaccagagcgccgagacccacagccacaagcagagcagacuguacaagagaaaggccaacgacgagagcaacgagcacagcgacgugaucgacagccaggagcugagcaaggugagcagagaguuccacagccacgaguuccacagccacgaggacaugcuggugguggaccccaagagcaaggaggaggacaagcaccugaaguucagaaucagccacgagcuggacagcgccagcagcgaggugaacuga

SEQ ID NO: 2901 - RNA, 879 nt, Artificial Sequence
  AEA49030 variant
augagaaucgccgugaucugcuucugccugcugggcaucaccugcgccauccccgugaagcaggccgacagcggcagcagcgaggagaagcagcuguacaacaaguaccccgacgccguggccaccuggcugaaccccgaccccagccagaagcagaaccugcuggccccccagaacgccgugagcagcgaggagaccaacgacuucaagcaggagacccugcccagcaagagcaacgagagccacgaccacauggacgacauggacgacgaggacgacgacagccaccagagcgacgagagccaccacagcgacgagagcgacgagcuggugaccgacuuccccaccgaccugcccgccaccgagguguucacccccguggugcccaccguggacaccuacgacggcagaggcgacagcgugguguacggccugagaagcaagagcaagaaguucagaagacccgacauccaguaccccgacgccaccgacgaggacaucaccagccacauggagagcgaggagcugaacggcgccuacaaggccauccccguggcccaggaccugaacgcccccagcgacugggacagcagaggcaaggacagcuacgagaccagccagcuggacgaccagagcgccgagacccacagccacaagcagagcagacuguacaagagaaaggccaacgacgagagcaacgagcacagcgacgugaucgacagccaggagcugagcaaggugagcagagaguuccacagccacgaguuccacagccacgaggacaugcuggugguggaccccaagagcaaggaggaggacaagcaccugaaguucagaaucagccacgagcuggacagcgccagcagcgaggugaacuga

SEQ ID NO: 2902 - RNA, 945 nt, Artificial Sequence; identical to SEQ ID NO: 2897
  AAA86886 variant

SEQ ID NO: 2903 - RNA, 1182 nt, Artificial Sequence
  AAA59988 variant
auggaggagccccagagcgaccccagcguggagcccccccugagccaggagaccuucagcgaccuguggaagcugcugcccgagaacaacgugcugagcccccugcccagccaggccauggacgaccugaugcugagccccgacgacaucgagcagugguucaccgaggaccccggccccgacgaggcccccagaaugcccgaggccgccccccccguggcccccgcccccgccgcccccacccccgccgcccccgcccccgcccccagcuggccccugagcagcagcgugcccagccagaagaccuaccagggcagcuacggcuucagacugggcuuccugcacagcggcaccgccaagagcgugaccugcaccuacagccccgcccugaacaagauguucugccagcuggccaagaccugccccgugcagcuguggguggacagcacccccccccccggcaccagagugagagccauggccaucuacaagcagagccagcacaugaccgagguggugagaagaugcccccaccacgagagaugcagcgacagcgacggccuggcccccccccagcaccugaucagaguggagggcaaccugagaguggaguaccuggacgacagaaacaccuucagacacagcgugguggugcccuacgagccccccgaggugggcagcgacugcaccaccauccacuacaacuacaugugcaacagcagcugcaugggcggcaugaacagaagacccauccugaccaucaucacccuggaggacagcagcggcaaccugcugggcagaaacagcuucgaggugagagugugcgccugccccggcagagacagaagaaccgaggaggagaaccugagaaagaagggcgagccccaccacgagcugccccccggcagcaccaagagagcccugcccaacaacaccagcagcagcccccagcccaagaagaagccccuggacggcgaguacuucacccugcagaucagaggcagagagagauucgagauguucagagagcugaacgaggcccuggagcugaaggacgcccaggccggcaaggagcccggcggcagcagagcccacagcagccaccugaagagcaagaagggccagagcaccagcagacacaagaagcugauguucaagaccgagggccccgacagcgacuga

SEQ ID NO: 2904 - RNA, 309 nt, Artificial Sequence
  AAF88037 variant
augagcgccagagugagaagcagaagcagaggcagaggcgacggccaggaggcccccgacgugguggccuucguggcccccggcgagagccagcaggaggagccccccaccgacaaccaggacaucgagcccggccaggagagagagggcaccccccccaucgaggagagaaagguggagggcgacugccaggagauggaccuggagaagaccagaagcgagagaggcgacggcagcgacgugaaggagaagaccccccccaaccccaagcacgccaagaccaaggaggccggcgacggccagcccuga

SEQ ID NO: 2905 - RNA, 1209 nt, Artificial Sequence
  AAA60003 variant
augcagaugagccccgcccugaccugccuggugcugggccuggcccugguguucggcgagggcagcgccgugcaccacccccccagcuacguggcccaccuggccagcgacuucggcgugagaguguuccagcagguggcccaggccagcaaggacagaaacgugguguucagccccuacggcguggccagcgugcuggccaugcugcagcugaccaccggcggcgagacccagcagcagauccaggccgccaugggcuucaagaucgacgacaagggcauggcccccgcccugagacaccuguacaaggagcugaugggccccuggaacaaggacgagaucagcaccaccgacgccaucuucgugcagagagaccugaagcuggugcagggcuucaugccccacuucuucagacuguucagaagcaccgugaagcagguggacuucagcgagguggagagagccagauucaucaucaacgacugggugaagacccacaccaagggcaugaucagcaaccugcugggcaagggcgccguggaccagcugaccagacuggugcuggugaacgcccuguacuucaacggccaguggaagacccccuuccccgacagcagcacccacagaagacuguuccacaagagcgacggcagcaccgugagcgugcccaugauggcccagaccaacaaguucaacuacaccgaguucaccacccccgacggccacuacuacgacauccuggagcugcccuaccacggcgacacccugagcauguucaucgccgcccccuacgagaaggaggugccccugagcgcccugaccaacauccugagcgcccagcugaucagccacuggaagggcaacaugaccagacugcccagacugcuggugcugcccaaguucagccuggagaccgagguggaccugagaaagccccuggagaaccugggcaugaccgacauguucagacaguuccaggccgacuucaccagccugagcgaccaggagccccugcacguggcccaggcccugcagaaggugaagaucgaggugaacgagagcggcaccguggccagcagcagcaccgccgugaucgugagcgccagaauggcccccgaggagaucaucauggacagacccuuccuguucguggugagacacaaccccaccggcaccgugcuguucaugggccaggugauggagcccuga

SEQ ID NO: 2906 - RNA, 1248 nt, Artificial Sequence
  AAA36797 variant
auggaggaccugugcguggccaacacccuguucgcccugaaccuguucaagcaccuggccaaggccagccccacccagaaccuguuccugagccccuggagcaucagcagcaccauggccaugguguacaugggcagcagaggcagcaccgaggaccagauggccaaggugcugcaguucaacgaggugggcgccaacgccgugacccccaugacccccgagaacuucaccagcugcggcuucaugcagcagauccagaagggcagcuaccccgacgccauccugcaggcccaggccgccgacaagauccacagcagcuucagaagccugagcagcgccaucaacgccagcaccggcaacuaccugcuggagagcgugaacaagcuguucggcgagaagagcgccagcuucagagaggaguacaucagacugugccagaaguacuacagcagcgagccccaggccguggacuuccuggagugcgccgaggaggccagaaagaagaucaacagcugggugaagacccagaccaagggcaagauccccaaccugcugcccgagggcagcguggacggcgacaccagaauggugcuggugaacgccguguacuucaagggcaaguggaagacccccuucgagaagaagcugaacggccuguaccccuucagagugaacagcgcccagagaacccccgugcagaugauguaccugagagagaagcugaacaucggcuacaucgaggaccugaaggcccagauccuggagcugcccuacgccggcgacgugagcauguuccugcugcugcccgacgagaucgccgacgugagcaccggccuggagcugcuggagagcgagaucaccuacgacaagcugaacaaguggaccagcaaggacaagauggccgaggacgagguggagguguacaucccccaguucaagcuggaggagcacuacgagcugagaagcauccugagaagcaugggcauggaggacgccuucaacaagggcagagccaacuucagcggcaugagcgagagaaacgaccuguuccugagcgagguguuccaccaggccaugguggacgugaacgaggagggcaccgaggccgccgccggcaccggcggcgugaugaccggcagaaccggccacggcggcccccaguucguggccgaccaccccuuccuguuccugaucaugcacaagaucaccaacugcauccuguucuucggcagauucagcagccccuga

SEQ ID NO: 2907 - RNA, 528 nt, Artificial Sequence
  AAA60020 variant
augcugccccccauggcccugcccagcgugagcuggaugcugcugagcugccugaugcugcugagccaggugcagggcgaggagccccagagagagcugcccagcgccagaaucagaugccccaagggcagcaaggccuacggcagccacugcuacgcccuguuccugagccccaagagcuggaccgacgccgaccuggccugccagaagagacccagcggcaaccuggugagcgugcugagcggcgccgagggcagcuucgugagcagccuggugaagagcaucggcaacagcuacagcuacguguggaucggccugcacgaccccacccagggcaccgagcccaacggcgagggcugggaguggagcagcagcgacgugaugaacuacuucgccugggagagaaaccccagcaccaucagcagccccggccacugcgccagccugagcagaagcaccgccuuccugagauggaaggacuacaacugcaacgugagacugcccuacgugugcaaguucaccgacuga

SEQ ID NO: 2908 - RNA, 528 nt, Artificial Sequence; identical to SEQ ID NO: 2907
  AAT11159 variant

SEQ ID NO: 2909 - RNA, 381 nt, Artificial Sequence
  AAH39863 variant
auggacaagagccugcugcuggagcugcccauccugcugugcugcuucagagcccugagcggcagccugagcaugagaaacgacgccgugaacgagaucguggccgugaagaacaacuuccccgugaucgagaucgugcagugcagaaugugccaccugcaguuccccggcgagaagugcagcagaggcagaggcaucugcaccgccaccaccgaggaggccugcauggugggcagaauguucaagagagacggcaaccccuggcugaccuucaugggcugccugaagaacugcgccgacgugaagggcaucagauggagcguguaccuggugaacuucagaugcugcagaagccacgaccugugcaacgaggaccuguga

SEQ ID NO: 2910 - RNA, 1440 nt, Artificial Sequence
  CCDS42826.1 variant
augaccacccuggccggcgccgugcccagaaugaugagacccggccccggccagaacuaccccagaagcggcuucccccuggaggugagcaccccccugggccagggcagagugaaccagcugggcggcguguucaucaacggcagaccccugcccaaccacaucagacacaagaucguggagauggcccaccacggcaucagacccugcgugaucagcagacagcugagagugagccacggcugcgugagcaagauccugugcagauaccaggagaccggcagcaucagacccggcgccaucggcggcagcaagcccaagcaggugaccacccccgacguggagaagaagaucgaggaguacaagagagagaaccccggcauguucagcugggagaucagagacaagcugcugaaggacgccgugugcgacagaaacaccgugcccagcgugagcagcaucagcagaauccugagaagcaaguucggcaagggcgaggaggaggaggccgaccuggagagaaaggaggccgaggagagcgagaagaaggccaagcacagcaucgacggcauccugagcgagagagccagcgccccccagagcgacgagggcagcgacaucgacagcgagcccgaccugccccugaagagaaagcagagaagaagcagaaccaccuucaccgccgagcagcuggaggagcuggagagagccuucgagagaacccacuaccccgacaucuacaccagagaggagcuggcccagagagccaagcugaccgaggccagagugcaggugugguucagcaacagaagagccagauggagaaagcaggccggcgccaaccagcugauggccuucaaccaccugauccccggcggcuucccccccaccgccaugcccacccugcccaccuaccagcugagcgagaccagcuaccagcccaccagcaucccccaggccgugagcgaccccagcagcaccgugcacagaccccagccccugccccccagcaccgugcaccagagcaccauccccagcaaccccgacagcagcagcgccuacugccugcccagcaccagacacggcuucagcagcuacaccgacagcuucgugccccccagcggccccagcaaccccaugaaccccaccaucggcaacggccugagcccccaggugaugggccugcugaccaaccacggcggcgugccccaccagccccagaccgacuacgcccugagcccccugaccggcggccuggagcccaccaccaccgugagcgccagcugcagccagagacuggaccacaugaagagccuggacagccugcccaccagccagagcuacugcccccccaccuacagcaccaccggcuacagcauggaccccgugaccggcuaccaguacggccaguacggccagagcaagcccuggaccuucuga

SEQ ID NO: 2911 - RNA, 1176 nt, Artificial Sequence
  AAA58397 variant
auggaccuggagaagaacuaccccacccccagaaccagcagaaccggccacggcggcgugaaccagcugggcggcguguucgugaacggcagaccccugcccgacguggugagacagagaaucguggagcuggcccaccagggcgugagacccugcgacaucagcagacagcugagagugagccacggcugcgugagcaagauccugggcagauacuacgagaccggcagcaucaagcccggcgugaucggcggcagcaagcccaagguggccacccccaaggugguggagaagaucgccgaguacaagagacagaaccccaccauguucgccugggagaucagagacagacugcuggccgagagagugugcgacaacgacaccgugcccagcgugagcagcaucaacagaaucaucagaaccaaggugcagcagccccccaaccagcccgugcccgccagcagccacagcaucgugagcaccggcagcgugacccaggugagcagcgugagcaccgacagcgccggcagcagcuacagcaucagcggcauccugggcaucaccagccccagcgccgacaccaacaagagaaagagagacgagggcauccaggagagccccgugcccaacggccacagccugcccggcagagacuuccugagaaagcagaugagaggcgaccuguucacccagcagcagcuggaggugcuggacagaguguucgagagacagcacuacagcgacaucuucaccaccaccgagcccaucaagcccgagcagaccaccgaguacagcgccauggccagccuggccggcggccuggacgacaugaaggccaaccuggccagccccacccccgccgacaucggcagcagcgugcccggcccccagagcuaccccaucgugaccggcagagaccuggccagcaccacccugcccggcuaccccccccacgugccccccgccggccagggcagcuacagcgcccccacccugaccggcauggugcccggcagcgaguucagcggcagccccuacagccacccccaguacagcagcuacaacgacagcuggagauuccccaaccccggccugcugggcagccccuacuacuacagcgccgccgccagaggcgccgccccccccgccgccgccaccgccuacgacagacacuga

SEQ ID NO: 2912 - RNA, 873 nt, Artificial Sequence
  AAF25807 variant
augagaaucuucgccguguucaucuucaugaccuacuggcaccugcugaacgccuucaccgugaccgugcccaaggaccuguacgugguggaguacggcagcaacaugaccaucgagugcaaguuccccguggagaagcagcuggaccuggccgcccugaucguguacugggagauggaggacaagaacaucauccaguucgugcacggcgaggaggaccugaaggugcagcacagcagcuacagacagagagccagacugcugaaggaccagcugagccugggcaacgccgcccugcagaucaccgacgugaagcugcaggacgccggcguguacagaugcaugaucagcuacggcggcgccgacuacaagagaaucaccgugaaggugaacgcccccuacaacaagaucaaccagagaauccuggugguggaccccgugaccagcgagcacgagcugaccugccaggccgagggcuaccccaaggccgaggugaucuggaccagcagcgaccaccaggugcugagcggcaagaccaccaccaccaacagcaagagagaggagaagcuguucaacgugaccagcacccugagaaucaacaccaccaccaacgagaucuucuacugcaccuucagaagacuggaccccgaggagaaccacaccgccgagcuggugauccccgagcugccccuggcccacccccccaacgagagaacccaccuggugauccugggcgccauccugcugugccugggcguggcccugaccuucaucuucagacugagaaagggcagaaugauggacgugaagaagugcggcauccaggacaccaacagcaagaagcagagcgacacccaccuggaggagaccuga

SEQ ID NO: 2913 - RNA, 867 nt, Artificial Sequence
  AAH74740 variant
augcagaucccccaggcccccuggcccguggugugggccgugcugcagcugggcuggagacccggcugguuccuggacagccccgacagacccuggaacccccccaccuucagccccgcccugcugguggugaccgagggcgacaacgccaccuucaccugcagcuucagcaacaccagcgagagcuucgugcugaacugguacagaaugagccccagcaaccagaccgacaagcuggccgccuuccccgaggacagaagccagcccggccaggacugcagauucagagugacccagcugcccaacggcagagacuuccacaugagcguggugagagccagaagaaacgacagcggcaccuaccugugcggcgccaucagccuggcccccaaggcccagaucaaggagagccugagagccgagcugagagugaccgagagaagagccgaggugcccaccgcccaccccagccccagccccagacccgccggccaguuccagacccugguggugggcguggugggcggccugcugggcagccuggugcugcuggugugggugcuggccgugaucugcagcagagccgccagaggcaccaucggcgccagaagaaccggccagccccugaaggaggaccccagcgccgugcccguguucagcguggacuacggcgagcuggacuuccaguggagagagaagacccccgagccccccgugcccugcgugcccgagcagaccgaguacgccaccaucguguuccccagcggcaugggcaccagcagccccgccagaagaggcagcgccgacggccccagaagcgcccagccccugagacccgaggacggccacugcagcuggccccuguga

SEQ ID NO: 2914 - RNA, 1008 nt, Artificial Sequence
  AAC95296 variant
augggcagcgccagccccggccugagcagcgugagccccagccaccugcugcugccccccgacaccgugagcagaaccggccuggagaaggccgccgccggcgccgugggccuggagagaagagacuggagccccagcccccccgccacccccgagcagggccugagcgccuucuaccugagcuacuucgacaugcuguaccccgaggacagcagcugggccgccaaggcccccggcgccagcagcagagaggagccccccgaggagcccgagcagugccccgugaucgacagccaggcccccgccggcagccuggaccuggugcccggcggccugacccuggaggagcacagccuggagcaggugcagagcaugguggugggcgaggugcugaaggacaucgagaccgccugcaagcugcugaacaucaccgccgaccccauggacuggagccccagcaacgugcagaaguggcugcuguggaccgagcaccaguacagacugccccccaugggcaaggccuuccaggagcuggccggcaaggagcugugcgccaugagcgaggagcaguucagacagagaagcccccugggcggcgacgugcugcacgcccaccuggacaucuggaagagcgccgccuggaugaaggagagaaccagccccggcgccauccacuacugcgccagcaccagcgaggagagcuggaccgacagcgagguggacagcagcugcagcggccagcccauccaccuguggcaguuccugaaggagcugcugcugaagccccacagcuacggcagauucaucagauggcugaacaaggagaagggcaucuucaagaucgaggacagcgcccagguggccagacuguggggcaucagaaagaacagacccgccaugaacuacgacaagcugagcagaagcaucagacaguacuacaagaagggcaucaucagaaagcccgacaucagccagagacugguguaccaguucgugcaccccaucuga

SEQ ID NO: 2915 - RNA, 2217 nt, Artificial Sequence
  AAA36429 variant
augcagcccagaugggcccagggcgccaccauguggcugggcgugcugcugacccugcugcugugcagcagccuggagggccaggagaacagcuucaccaucaacagcguggacaugaagagccugcccgacuggaccgugcagaacggcaagaaccugacccugcagugcuucgccgacgugagcaccaccagccacgugaagccccagcaccagaugcuguucuacaaggacgacgugcuguucuacaacaucagcagcaugaagagcaccgagagcuacuucauccccgaggugagaaucuacgacagcggcaccuacaagugcaccgugaucgugaacaacaaggagaagaccaccgccgaguaccagcugcugguggagggcgugcccagccccagagugacccuggacaagaaggaggccauccagggcggcaucgugagagugaacugcagcgugcccgaggagaaggcccccauccacuucaccaucgagaagcuggagcugaacgagaagauggugaagcugaagagagagaagaacagcagagaccagaacuucgugauccuggaguuccccguggaggagcaggacagagugcugagcuucagaugccaggccagaaucaucagcggcauccacaugcagaccagcgagagcaccaagagcgagcuggugaccgugaccgagagcuucagcacccccaaguuccacaucagccccaccggcaugaucauggagggcgcccagcugcacaucaagugcaccauccaggugacccaccuggcccaggaguuccccgagaucaucauccagaaggacaaggccaucguggcccacaacagacacggcaacaaggccguguacagcgugauggccaugguggagcacagcggcaacuacaccugcaagguggagagcagcagaaucagcaaggugagcagcaucguggugaacaucaccgagcuguucagcaagcccgagcuggagagcagcuucacccaccuggaccagggcgagagacugaaccugagcugcagcauccccggcgccccccccgccaacuucaccauccagaaggaggacaccaucgugagccagacccaggacuucaccaagaucgccagcaagagcgacagcggcaccuacaucugcaccgccggcaucgacaagguggugaagaagagcaacaccgugcagaucguggugugcgagaugcugagccagcccagaaucagcuacgacgcccaguucgaggugaucaagggccagaccaucgaggugagaugcgagagcaucagcggcacccugcccaucagcuaccagcugcugaagaccagcaaggugcuggagaacagcaccaagaacagcaacgaccccgccguguucaaggacaaccccaccgaggacguggaguaccagugcguggccgacaacugccacagccacgccaagaugcugagcgaggugcugagagugaaggugaucgcccccguggacgaggugcagaucagcauccugagcagcaaggugguggagagcggcgaggacaucgugcugcagugcgccgugaacgagggcagcggccccaucaccuacaaguucuacagagagaaggagggcaagcccuucuaccagaugaccagcaacgccacccaggccuucuggaccaagcagaaggccagcaaggagcaggagggcgaguacuacugcaccgccuucaacagagccaaccacgccagcagcgugcccagaagcaagauccugaccgugagagugauccuggcccccuggaagaagggccugaucgccguggugaucaucggcgugaucaucgcccugcugaucaucgccgccaagugcuacuuccugagaaaggccaaggccaagcagaugcccguggagaugagcagacccgccgugccccugcugaacagcaacaacgagaagaugagcgaccccaacauggaggccaacagccacuacggccacaacgacgacgugagaaaccacgccaugaagcccaucaacgacaacaaggagccccugaacagcgacgugcaguacaccgaggugcaggugagcagcgccgagagccacaaggaccugggcaagaaggacaccgagaccguguacagcgaggugagaaaggccgugcccgacgccguggagagcagauacagcagaaccgagggcagccuggacggcaccuga

SEQ ID NO: 2916 - RNA, 2736 nt, Artificial Sequence
  AAG23134 variant
auggcccagcuguuccugccccugcuggccgcccuggugcuggcccaggcccccgccgcccuggccgacgugcuggagggcgacagcagcgaggacagagccuucagagugagaaucgccggcgacgccccccugcagggcgugcugggcggcgcccugaccauccccugccacgugcacuaccugagacccccccccagcagaagagccgugcugggcagccccagagugaaguggaccuuccugagcagaggcagagaggccgaggugcugguggccagaggcgugagagugaaggugaacgaggccuacagauucagaguggcccugcccgccuaccccgccagccugaccgacgugagccuggcccugagcgagcugagacccaacgacagcggcaucuacagaugcgaggugcagcacggcaucgacgacagcagcgacgccguggaggugaaggugaagggcgugguguuccuguacagagagggcagcgccagauacgccuucagcuucagcggcgcccaggaggccugcgccagaaucggcgcccacaucgccacccccgagcagcuguacgccgccuaccugggcggcuacgagcagugcgacgccggcuggcugagcgaccagaccgugagauaccccauccagacccccagagaggccugcuacggcgacauggacggcuuccccggcgugagaaacuacggcgugguggaccccgacgaccuguacgacguguacugcuacgccgaggaccugaacggcgagcuguuccugggcgacccccccgagaagcugacccuggaggaggccagagccuacugccaggagagaggcgccgagaucgccaccaccggccagcuguacgccgccugggacggcggccuggaccacugcagccccggcuggcuggccgacggcagcgugagauaccccaucgugacccccagccagagaugcggcggcggccugcccggcgugaagacccuguuccuguuccccaaccagaccggcuuccccaacaagcacagcagauucaacguguacugcuucagagacagcgcccagcccagcgccauccccgaggccagcaaccccgccagcaaccccgccagcgacggccuggaggccaucgugaccgugaccgagacccuggaggagcugcagcugccccaggaggccaccgagagcgagagcagaggcgccaucuacagcauccccaucauggaggacggcggcggcggcagcagcacccccgaggaccccgccgaggcccccagaacccugcuggaguucgagacccagagcauggugccccccaccggcuucagcgaggaggagggcaaggcccuggaggaggaggagaaguacgaggacgaggaggagaaggaggaggaggaggaggaggaggagguggaggacgaggcccugugggccuggcccagcgagcugagcagccccggccccgaggccagccugcccaccgagcccgccgcccaggaggagagccugagccaggcccccgccagagccgugcugcagcccggcgccagcccccugcccgacggcgagagcgaggccagcagaccccccagagugcacggcccccccaccgagacccugcccacccccagagagagaaaccuggccagccccagccccagcacccugguggaggccagagaggugggcgaggccaccggcggccccgagcugagcggcgugcccagaggcgagagcgaggagaccggcagcagcgagggcgcccccagccugcugcccgccaccagagcccccgagggcaccagagagcuggaggcccccagcgaggacaacagcggcagaaccgcccccgccggcaccagcgugcaggcccagcccgugcugcccaccgacagcgccagcagaggcggcguggccguggugcccgccagcggcgacugcgugcccagccccugccacaacggcggcaccugccuggaggaggaggagggcgugagaugccugugccugcccggcuacggcggcgaccugugcgacgugggccugagauucugcaaccccggcugggacgccuuccagggcgccugcuacaagcacuucagcaccagaagaagcugggaggaggccgagacccagugcagaauguacggcgcccaccuggccagcaucagcacccccgaggagcaggacuucaucaacaacagauacagagaguaccaguggaucggccugaacgacagaaccaucgagggcgacuuccuguggagcgacggcgugccccugcuguacgagaacuggaaccccggccagcccgacagcuacuuccugagcggcgagaacugcguggugaugguguggcacgaccagggccaguggagcgacgugcccugcaacuaccaccugagcuacaccugcaagaugggccuggugagcugcggccccccccccgagcugccccuggcccagguguucggcagacccagacugagauacgagguggacaccgugcugagauacagaugcagagagggccuggcccagagaaaccugccccugaucagaugccaggagaacggcagaugggaggccccccagaucagcugcgugcccagaagacccgccagagcccugcaccccgaggaggaccccgagggcagacagggcagacugcugggcagauggaaggcccugcugaucccccccagcagccccaugcccggccccuga

SEQ ID NO: 2917 - RNA, 3321 nt, Artificial Sequence
  AAA60049 variant
augagacugcccggcgccaugcccgcccuggcccugaagggcgagcugcugcugcugagccugcugcugcugcuggagccccagaucagccagggccugguggugaccccccccggccccgagcuggugcugaacgugagcagcaccuucgugcugaccugcagcggcagcgcccccguggugugggagagaaugagccaggagcccccccaggagauggccaaggcccaggacggcaccuucagcagcgugcugacccugaccaaccugaccggccuggacaccggcgaguacuucugcacccacaacgacagcagaggccuggagaccgacgagagaaagagacuguacaucuucgugcccgaccccaccgugggcuuccugcccaacgacgccgaggagcuguucaucuuccugaccgagaucaccgagaucaccauccccugcagagugaccgacccccagcugguggugacccugcacgagaagaagggcgacguggcccugcccgugcccuacgaccaccagagaggcuucagcggcaucuucgaggacagaagcuacaucugcaagaccaccaucggcgacagagagguggacagcgacgccuacuacguguacagacugcaggugagcagcaucaacgugagcgugaacgccgugcagaccguggugagacagggcgagaacaucacccugaugugcaucgugaucggcaacgagguggugaacuucgaguggaccuaccccagaaaggagagcggcagacugguggagcccgugaccgacuuccugcuggacaugcccuaccacaucagaagcauccugcacauccccagcgccgagcuggaggacagcggcaccuacaccugcaacgugaccgagagcgugaacgaccaccaggacgagaaggccaucaacaucaccgugguggagagcggcuacgugagacugcugggcgaggugggcacccugcaguucgccgagcugcacagaagcagaacccugcaggugguguucgaggccuaccccccccccaccgugcugugguucaaggacaacagaacccugggcgacagcagcgccggcgagaucgcccugagcaccagaaacgugagcgagaccagauacgugagcgagcugacccuggugagagugaagguggccgaggccggccacuacaccaugagagccuuccacgaggacgccgaggugcagcugagcuuccagcugcagaucaacgugcccgugagagugcuggagcugagcgagagccaccccgacagcggcgagcagaccgugagaugcagaggcagaggcaugccccagcccaacaucaucuggagcgccugcagagaccugaagagaugccccagagagcugccccccacccugcugggcaacagcagcgaggaggagagccagcuggagaccaacgugaccuacugggaggaggagcaggaguucgagguggugagcacccugagacugcagcacguggacagaccccugagcgugagaugcacccugagaaacgccgugggccaggacacccaggaggugaucguggugccccacagccugcccuucaaggugguggugaucagcgccauccuggcccugguggugcugaccaucaucagccugaucauccugaucaugcuguggcagaagaagcccagauacgagaucagauggaaggugaucgagagcgugagcagcgacggccacgaguacaucuacguggaccccaugcagcugcccuacgacagcaccugggagcugcccagagaccagcuggugcugggcagaacccugggcagcggcgccuucggccaggugguggaggccaccgcccacggccugagccacagccaggccaccaugaagguggccgugaagaugcugaagagcaccgccagaagcagcgagaagcaggcccugaugagcgagcugaagaucaugagccaccugggcccccaccugaacguggugaaccugcugggcgccugcaccaagggcggccccaucuacaucaucaccgaguacugcagauacggcgaccugguggacuaccugcacagaaacaagcacaccuuccugcagcaccacagcgacaagagaagaccccccagcgccgagcuguacagcaacgcccugcccgugggccugccccugcccagccacgugagccugaccggcgagagcgacggcggcuacauggacaugagcaaggacgagagcguggacuacgugcccaugcuggacaugaagggcgacgugaaguacgccgacaucgagagcagcaacuacauggcccccuacgacaacuacgugcccagcgcccccgagagaaccugcagagccacccugaucaacgagagccccgugcugagcuacauggaccuggugggcuucagcuaccagguggccaacggcauggaguuccuggccagcaagaacugcgugcacagagaccuggccgccagaaacgugcugaucugcgagggcaagcuggugaagaucugcgacuucggccuggccagagacaucaugagagacagcaacuacaucagcaagggcagcaccuuccugccccugaaguggauggcccccgagagcaucuucaacagccuguacaccacccugagcgacguguggagcuucggcauccugcugugggagaucuucacccugggcggcacccccuaccccgagcugcccaugaacgagcaguucuacaacgccaucaagagaggcuacagaauggcccagcccgcccacgccagcgacgagaucuacgagaucaugcagaagugcugggaggagaaguucgagaucagaccccccuucagccagcuggugcugcugcuggagagacugcugggcgagggcuacaagaagaaguaccagcagguggacgaggaguuccugagaagcgaccaccccgccauccugagaagccaggccagacugcccggcuuccacggccugagaagcccccuggacaccagcagcgugcuguacaccgccgugcagcccaacgagggcgacaacgacuacaucaucccccugcccgaccccaagcccgagguggccgacgagggcccccuggagggcagccccagccuggccagcagcacccugaacgaggugaacaccagcagcaccaucagcugcgacagcccccuggagccccaggacgagcccgagcccgagccccagcuggagcugcagguggagcccgagcccgagcuggagcagcugcccgacagcggcugccccgcccccagagccgaggccgaggacagcuuccuguga

SEQ ID NO: 2918 - RNA, 942 nt, Artificial Sequence
  EAX03935 variant
augcugcugagcaagaucaacagccuggcccaccugagagccgcccccugcaacgaccugcacgccaccaagcuggcccccggcaaggagaaggagccccuggagagccaguaccaggugggcccccugcugggcagcggcggcuucggcagcguguacagcggcaucagagugagcgacaaccugcccguggccaucaagcacguggagaaggacagaaucagcgacuggggcgagcugcccaacggcaccagagugcccauggagguggugcugcugaagaaggugagcagcggcuucagcggcgugaucagacugcuggacugguucgagagacccgacagcuucgugcugauccuggagagacccgagcccgugcaggaccuguucgacuucaucaccgagagaggcgcccugcaggaggagcuggccagaagcuucuucuggcaggugcuggaggccgugagacacugccacaacugcggcgugcugcacagagacaucaaggacgagaacauccugaucgaccugaacagaggcgagcugaagcugaucgacuucggcagcggcgcccugcugaaggacaccguguacaccgacuucgacggcaccagaguguacagcccccccgaguggaucagauaccacagauaccacggcagaagcgccgccguguggagccugggcauccugcuguacgacauggugugcggcgacauccccuucgagcacgacgaggagaucaucagaggccagguguucuucagacagagagugagcagcgagugccagcaccugaucagauggugccuggcccugagacccagcgacagacccaccuucgaggagauccagaaccaccccuggaugcaggacgugcugcugccccaggagaccgccgagauccaccugcacagccugagccccggccccagcaaguga

SEQ ID NO: 2919 - RNA, 303 nt, Artificial Sequence
  AAB81333 variant
auggccgacgaggagaagcugccccccggcugggagaagagaaugagcagacccagcggcagaggcuacuacuucaaccacaucaccaaccccagccagugggagagacccagcggcaacagcagcagcggcggcaagaucuggcagggcgagcccgccagagugagaagaagccaccugcuggugaagcccgugaaggccgcccuggaccuggccgccggcaaccaccccgaccagggcggcggccccggcgccgaccagagacugcaccccgaggaccagggcagaagagagggccuguga

SEQ ID NO: 2920 - RNA, 492 nt, Artificial Sequence
  AAC50492 variant
auggccgacgaggagaagcugccccccggcugggagaagagaaugagcagaagcagcggcagaguguacuacuucaaccacaucaccaacgccagccagugggagagacccagcggcaacagcagcagcggcggcaagaacggccagggcgagcccgccagagugagaugcagccaccugcuggugaagcacagccagagcagaagacccagcagcuggagacaggagaagaucaccagaaccaaggaggaggcccuggagcugaucaacggcuacauccagaagaucaagagcggcgaggaggacuucgagagccuggccagccaguucagcgacugcagcagcgccaaggccagaggcgaccugggcgccuucagcagaggccagaugcagaagcccuucgaggacgccagcuucgcccugagaaccggcgagaugagcggccccguguucaccgacagcggcauccacaucauccugagaaccgaguga

SEQ ID NO: 2921 - RNA, 138 nt, Artificial Sequence
  AAH31971 variant
augcagaagcccuucgaggacgccagcuucgcccugagaaccggcgagaugagcggccccguguucaccgacagcggcauccacaucauccugagaaccgagugcuggagacagaccagaggccccaacugcuucuga

SEQ ID NO: 2922 - RNA, 639 nt, Artificial Sequence
  AAG22596 variant
augaagguguucaaguucaucggccugaugauccugcugaccagcgccuucagcgccggcagcggccagagccccaugaccgugcugugcagcaucgacugguucauggugaccgugcaccccuucaugcugaacaacgacgugugcgugcacuuccacgagcugcaccugggccugggcugcccccccaaccacgugcagccccacgccuaccaguucaccuacagagugaccgagugcggcaucagagccaaggccgugagccaggacauggugaucuacagcaccgagauccacuacagcagcaagggcacccccagcaaguucgugauccccgugagcugcgccgccccccagaagagccccuggcugaccaagcccugcagcaugagaguggccagcaagagcagagccaccgcccagaaggacgagaagugcuacgagguguucagccugagccagagcagccagagacccaacugcgacugcccccccugcguguucagcgaggaggagcacacccaggugcccugccaccaggccggcgcccaggaggcccagccccugcagcccagccacuuccuggacaucagcgaggacuggagccugcacaccgacgacaugaucggcagcauguga

SEQ ID NO: 2923 - RNA, 1986 nt, Artificial Sequence
  AAB00386 variant
auggaccuggugcugaagagaugccugcugcaccuggccgugaucggcgcccugcuggccgugggcgccaccaaggugcccagaaaccaggacuggcugggcgugagcagacagcugagaaccaaggccuggaacagacagcuguaccccgaguggaccgaggcccagagacuggacugcuggagaggcggccaggugagccugaaggugagcaacgacggccccacccugaucggcgccaacgccagcuucagcaucgcccugaacuuccccggcagccagaaggugcugcccgacggccaggugaucugggugaacaacaccaucaucaacggcagccagguguggggcggccagcccguguacccccaggagaccgacgacgccugcaucuuccccgacggcggccccugccccagcggcagcuggagccagaagagaagcuucguguacguguggaagaccuggggccaguacuggcaggugcugggcggccccgugagcggccugagcaucggcaccggcagagccaugcugggcacccacaccauggaggugaccguguaccacagaagaggcagcagaagcuacgugccccuggcccacagcagcagcgccuucaccaucaccgaccaggugcccuucagcgugagcgugagccagcugagagcccuggacggcggcaacaagcacuuccugagaaaccagccccugaccuucgcccugcagcugcacgaccccagcggcuaccuggccgaggccgaccugagcuacaccugggacuucggcgacagcagcggcacccugaucagcagagcccugguggugacccacaccuaccuggagcccggccccgugaccgcccagguggugcugcaggccgccaucccccugaccagcugcggcagcagccccgugcccggcaccaccgacggccacagacccaccgccgaggcccccaacaccaccgccggccaggugcccaccaccgagguggugggcaccacccccggccaggcccccaccgccgagcccagcggcaccaccagcgugcaggugcccaccaccgaggugaucagcaccgcccccgugcagaugcccaccgccgagagcaccggcaugacccccgagaaggugcccgugagcgaggugaugggcaccacccuggccgagaugagcacccccgaggccaccggcaugacccccgccgaggugagcaucguggugcugagcggcaccaccgccgcccaggugaccaccaccgaguggguggagaccaccgccagagagcugcccauccccgagcccgagggccccgacgccagcagcaucaugagcaccgagagcaucaccggcagccugggcccccugcuggacggcaccgccacccugagacuggugaagagacaggugccccuggacugcgugcuguacagauacggcagcuucagcgugacccuggacaucgugcagggcaucgagagcgccgagauccugcaggccgugcccagcggcgagggcgacgccuucgagcugaccgugagcugccagggcggccugcccaaggaggccugcauggagaucagcagccccggcugccagccccccgcccagagacugugccagcccgugcugcccagccccgccugccagcuggugcugcaccagauccugaagggcggcagcggcaccuacugccugaacgugagccuggccgacaccaacagccuggccguggugagcacccagcugaucaugcccggccaggaggccggccugggccaggugccccugaucgugggcauccugcuggugcugauggccguggugcuggccagccugaucuacagaagaagacugaugaagcaggacuucagcgugccccagcugccccacagcagcagccacuggcugagacugcccagaaucuucugcagcugccccaucggcgagaacagcccccugcugagcggccagcagguguga

SEQ ID NO: 2924 - RNA, 2649 nt, Artificial Sequence
  CCDS10255.1 variant
auggagcccgcccccgccagaagccccagaccccagcaggaccccgccagaccccaggagcccaccaugcccccccccgagacccccagcgagggcagacagcccagccccagccccagccccaccgagagagcccccgccagcgaggaggaguuccaguuccugagaugccagcagugccaggccgaggccaagugccccaagcugcugcccugccugcacacccugugcagcggcugccuggaggccagcggcaugcagugccccaucugccaggcccccuggccccugggcgccgacacccccgcccuggacaacguguucuucgagagccugcagagaagacugagcguguacagacagaucguggacgcccaggccgugugcaccagaugcaaggagagcgccgacuucuggugcuucgagugcgagcagcugcugugcgccaagugcuucgaggcccaccagugguuccugaagcacgaggccagaccccuggccgagcugagaaaccagagcgugagagaguuccuggacggcaccagaaagaccaacaacaucuucugcagcaaccccaaccacagaacccccacccugaccagcaucuacugcagaggcugcagcaagccccugugcugcagcugcgcccugcuggacagcagccacagcgagcugaagugcgacaucagcgccgagauccagcagagacaggaggagcuggacgccaugacccaggcccugcaggagcaggacagcgccuucggcgccgugcacgcccagaugcacgccgccgugggccagcugggcagagccagagccgagaccgaggagcugaucagagagagagugagacaggugguggcccacgugagagcccaggagagagagcugcuggaggccguggacgccagauaccagagagacuacgaggagauggccagcagacugggcagacuggacgccgugcugcagagaaucagaaccggcagcgcccuggugcagagaaugaagugcuacgccagcgaccaggaggugcuggacaugcacggcuuccugagacaggcccugugcagacugagacaggaggagccccagagccugcaggccgccgugagaaccgacggcuucgacgaguucaaggugagacugcaggaccugagcagcugcaucacccagggcaaggacgccgccgugagcaagaaggccagccccgaggccgccagcacccccagagaccccaucgacguggaccugcccgaggaggccgagagagugaaggcccaggugcaggcccugggccuggccgaggcccagcccauggccguggugcagagcgugcccggcgcccaccccgugcccguguacgccuucagcaucaagggccccagcuacggcgaggacgugagcaacaccaccaccgcccagaagagaaagugcagccagacccagugccccagaaaggugaucaagauggagagcgaggagggcaaggaggccagacuggccagaagcagccccgagcagcccagacccagcaccagcaaggccgugagccccccccaccuggacggcccccccagccccagaagccccgugaucggcagcgagguguuccugcccaacagcaaccacguggccagcggcgccggcgaggccgaggagagagugguggugaucagcagcagcgaggacagcgacgccgagaacagcagcagcagagagcuggacgacagcagcagcgagagcagcgaccugcagcuggagggccccagcacccugagagugcuggacgagaaccuggccgacccccaggccgaggacagaccccugguguucuucgaccugaagaucgacaacgagacccagaagaucagccagcuggccgccgugaacagagagagcaaguucagaguggugauccagcccgaggccuucuucagcaucuacagcaaggccgugagccuggaggugggccugcagcacuuccugagcuuccugagcagcaugagaagacccauccuggccugcuacaagcuguggggccccggccugcccaacuucuucagagcccuggaggacaucaacagacugugggaguuccaggaggccaucagcggcuuccuggccgcccugccccugaucagagagagagugcccggcgccagcagcuucaagcugaagaaccuggcccagaccuaccuggccagaaacaugagcgagagaagcgccauggccgccgugcuggccaugagagaccugugcagacugcuggaggugagccccggcccccagcuggcccagcacguguaccccuucagcagccugcagugcuucgccagccugcagccccuggugcaggccgccgugcugcccagagccgaggccagacugcuggcccugcacaacgugagcuucauggagcugcugagcgcccacagaagagacagacagggcggccugaagaaguacagcagauaccugagccugcagaccaccacccugccccccgcccagcccgccuucaaccugcaggcccugggcaccuacuucgagggccugcuggagggccccgcccuggccagagccgagggcgugagcaccccccuggccggcagaggccuggccgagagagccagccagcagagcuga

SEQ ID NO: 2925 - RNA, 3228 nt, Artificial Sequence
  CCDS46409.1 variant
auggugguggagguggacagcaugcccgccgccagcagcgugaagaagcccuucggccugagaagcaagaugggcaaguggugcugcagaugcuuccccugcugcagagagagcggcaagagcaacgugggcaccagcggcgaccacgacgacagcgccaugaagacccugagaagcaagaugggcaaguggugcagacacugcuuccccugcugcagaggcagcggcaagagcaacgugggcgccagcggcgaccacgacgacagcgccaugaagacccugagaaacaagaugggcaaguggugcugccacugcuuccccugcugcagaggcagcagcaagagcaaggugggcgccuggggcgacuacgacgacagcgccuucauggagcccagauaccacgugagaggcgaggaccuggacaagcugcacagagccgccugguggggcaaggugcccagaaaggaccugaucgugaugcugagagacaccgacgugaacaagcaggacaagcagaagagaaccgcccugcaccuggccagcgccaacggcaacagcgagguggugaagcugcugcuggacagaagaugccagcugaacgugcuggacaacaagaagagaaccgcccugaucaaggccgugcagugccaggaggacgagugcgcccugaugcugcuggagcacggcaccgaccccaacauccccgacgaguacggcaacaccacccugcacuacgccaucuacaacgaggacaagcugauggccaaggcccugcugcuguacggcgccgacaucgagagcaagaacaagcacggccugaccccccugcugcugggcgugcacgagcagaagcagcagguggugaaguuccugaucaagaagaaggccaaccugaacgcccuggacagauacggcagaaccgcccugauccuggccgugugcugcggcagcgccagcaucgugagccugcugcuggagcagaacaucgacgugagcagccaggaccugagcggccagaccgccagagaguacgccgugagcagccaccaccacgugaucugccagcugcugagcgacuacaaggagaagcagaugcugaagaucagcagcgagaacagcaaccccgagcaggaccugaagcugaccagcgaggaggagagccagagauucaagggcagcgagaacagccagcccgagaagaugagccaggagcccgagaucaacaaggacggcgacagagagguggaggaggagaugaagaagcacgagagcaacaacgugggccugcuggagaaccugaccaacggcgugaccgccggcaacggcgacaacggccugaucccccagagaaagagcagaacccccgagaaccagcaguuccccgacaacgagagcgaggaguaccacagaaucugcgagcugcugagcgacuacaaggagaagcagaugcccaaguacagcagcgagaacagcaaccccgagcaggaccugaagcugaccagcgaggaggagagccagagacugaagggcagcgagaacggccagcccgagaagagaagccaggagcccgagaucaacaaggacggcgacagagagcuggagaacuucauggccaucgaggagaugaagaagcacagaagcacccacgugggcuuccccgagaaccugaccaacggcgccaccgccggcaacggcgacgacggccugaucccccccagaaagagcagaacccccgagagccagcaguuccccgacaccgagaacgaggaguaccacagcgacgagcagaacgacacccagaagcaguucugcgaggagcagaacaccggcauccugcacgacgagauccugauccacgaggagaagcagaucgaggugguggagaagaugaacagcgagcugagccugagcugcaagaaggagaaggacauccugcacgagaacagcacccugagagaggagaucgccaugcugagacuggagcuggacaccaugaagcaccagagccagcugagagagaagaaguaccuggaggacaucgagagcgugaagaagagaaacgacaaccugcugaaggcccugcagcugaacgagcugaccauggacgacgacaccgccgugcuggugaucgacaacggcagcggcaugugcaaggccggcuucgccggcgacgacgcccccagagccguguuccccagcaucgugggcagacccagacagcagggcaugaugggcggcaugcaccagaaggagagcuacgugggcaaggaggcccagagcaagagaggcauccugacccugaaguaccccauggagcacggcaucaucaccaacugggacgacauggagaagaucuggcaccacaccuucuacaacgagcugagaguggcccccgaggagcaccccgugcugcugaccgaggccacccugaaccccaaggccaacagagagaagaugacccagaucauguucgagaccuucaacacccccgccauguacguggccauccaggccgugcugagccuguacaccagcggcagaaccaccggcaucgugauggacagcggcgacggcgugacccacaccgugcccaucuacgagggcaacgcccugccccacgccacccugagacuggaccuggccggcagagagcugcccgacuaccugaugaagauccugaccgagcacggcuacagauucaccaccauggccgagagagagaucgugagagacaucaaggagaagcugugcuacguggcccuggacuucgagcaggagauggccaccguggccagcagcagcagccuggagaagagcuacgagcugcccgacggccaggugaucaccaucggcaacgagagauucagaugccccgaggcccuguuccagcccugcuuccugggcauggagagcugcggcauccacgagaccaccuucaacagcaucaugaagagcgacguggacaucagaaaggaccuguacaccaacaccgugcugagcggcggcaccaccauguaccccggcauggcccacagaaugcagaaggagaucgccgcccuggcccccagcaugaugaagaucagaaucaucgccccccccaagagaaaguacagcgugugggugggcggcagcauccuggccagccugagcaccuuccagcagauguggaucagcaagcaggaguacgacgagagcggccccagcaucgugcacagaaagugccuguga

SEQ ID NO: 2926 - RNA, 1755 nt, Artificial Sequence
  CCDS13562.1 variant
augguggccgaggugugcagcaugcccaccgccagcaccgugaagaagcccuucgaccugagaagcaagaugggcaaguggugccaccacagauuccccugcugcagaggcagcggcaagagcaacaugggcaccagcggcgaccacgacgacagcuucaugaagaugcugagaagcaagaugggcaagugcugcagacacugcuuccccugcugcagaggcagcggcaccagcaacgugggcaccagcggcgaccacgagaacagcuucaugaagaugcugagaagcaagaugggcaaguggugcugccacugcuuccccugcugcagaggcagcggcaagagcaacgugggcgccuggggcgacuacgaccacagcgccuucauggagcccagauaccacaucagaagagaggaccuggacaagcugcacagagccgccugguggggcaaggugcccagaaaggaccugaucgugaugcugagagacaccgacaugaacaagagagacaaggagaagagaaccgcccugcaccuggccagcgccaacggcaacagcgagguggugcagcugcugcuggacagaagaugccagcugaacgugcuggacaacaagaagagaaccgcccugaucaaggccauccagugccaggaggacgagugcgugcugaugcugcuggagcacggcgccgacagaaacauccccgacgaguacggcaacaccgcccugcacuacgccaucuacaacgaggacaagcugauggccaaggcccugcugcuguacggcgccgacaucgagagcaagaacaagugcggccugaccccccugcugcugggcgugcacgagcagaagcagcagguggugaaguuccugaucaagaagaaggccaaccugaacgugcuggacagauacggcagaaccgcccugauccuggccgugugcugcggcagcgccagcaucgugaaccugcugcuggagcagaacguggacgugagcagccaggaccugagcggccagaccgccagagaguacgccgugagcagccaccaccacgugaucugcgagcugcugagcgacuacaaggagaagcagaugcugaagaucagcagcgagaacagcaaccccgagcaggaccugaagcugaccagcgaggaggagagccagagacugaaggugagcgagaacagccagcccgagaagaugagccaggagcccgagaucaacaaggacugcgacagagagguggaggaggagaucaagaagcacggcagcaaccccgugggccugcccgagaaccugaccaacggcgccagcgccggcaacggcgacgacggccugaucccccagagaagaagcagaaagcccgagaaccagcaguuccccgacaccgagaacgaggaguaccacagcgacgagcagaacgacaccagaaagcagcugagcgaggagcagaacaccggcaucagccaggacgagauccugaccaacaagcagaagcagaucgagguggccgagcagaagaugaacagcgagcugagccugagccacaagaaggaggaggaccugcugagagagaacagcgugcugcaggaggagaucgccaugcugagacuggagcuggacgagaccaagcaccagaaccagcugagagagaacaagauccuggaggagaucgagagcgugaaggagaagaccgacaagcugcugagagccaugcagcugaacgaggaggcccugaccaagaccaacaucuga

SEQ ID NO: 2927 - RNA, 1530 nt, Artificial Sequence
  EAW59519 variant
auggagagaagaagacuguggggcagcauccagagcagauacaucagcaugagcguguggaccagccccagaagacugguggagcuggccggccagagccugcugaaggacgaggcccuggccaucgccgcccuggagcugcugcccagagagcuguuccccccccuguucauggccgccuucgacggcagacacagccagacccugaaggccauggugcaggccuggcccuucaccugccugccccugggcgugcugaugaagggccagcaccugcaccuggagaccuucaaggccgugcuggacggccuggacgugcugcuggcccaggaggugagacccagaagauggaagcugcaggugcuggaccugagaaagaacagccaccaggacuucuggaccguguggagcggcaacagagccagccuguacagcuuccccgagcccgaggccgcccagcccaugaccaagaagagaaagguggacggccugagcaccgaggccgagcagcccuucauccccguggaggugcugguggaccuguuccugaaggagggcgccugcgacgagcuguucagcuaccugaucgagaaggugaagagaaagaagaacgugcugagacugugcugcaagaagcugaagaucuucgccaugcccaugcaggacaucaagaugauccugaagauggugcagcuggacagcaucgaggaccuggaggugaccugcaccuggaagcugcccacccuggccaaguucagccccuaccugggccagaugaucaaccugagaagacugcugcugagccacauccacgccagcagcuacaucagccccgagaaggaggagcaguacaucgcccaguucaccagccaguuccugagccugcagugccugcaggcccuguacguggacagccuguucuuccugagaggcagacuggaccagcugcugagacacgugaugaacccccuggagacccugagcaucaccaacugcagacugagcgagggcgacgugaugcaccugagccagagccccagcgugagccagcugagcgugcugagccugagcggcgugaugcugaccgacgugagccccgagccccugcaggcccugcuggagagagccagcgccacccugcaggaccugguguucgacgagugcggcaucaccgacgaccagcugcuggcccugcugcccagccugagccacugcagccagcugaccacccugagcuucuacggcaacagcaucagcaucagcgcccugcagagccugcugcagcaccugaucggccugagcaaccugacccacgugcuguaccccgugccccuggagagcuacgaggacauccacggcacccugcaccuggagagacuggccuaccugcacgccagacugagagagcugcugugcgagcugggcagacccagcaugguguggcugagcgccaaccccugcccccacugcggcgacagaaccuucuacgaccccgagcccauccugugccccugcuucaugcccaacuga

SEQ ID NO: 2928 - RNA, 1530 nt, Artificial Sequence; identical to SEQ ID NO: 2927
  AAC51160 variant

SEQ ID NO: 2929 - RNA, 645 nt, Artificial Sequence
  CCDS8069.1 variant
augggccuggccggcgugugcgcccugagaagaagcgccggcuacauccuggugggcggcgccggcggccagagcgccgccgccgccgccagaagauacagcgagggcgagugggccagcggcggcgugagaagcuucagcagagccgccgccgccauggcccccaucaaggugggcgacgccauccccgccguggagguguucgagggcgagcccggcaacaaggugaaccuggccgagcuguucaagggcaagaagggcgugcuguucggcgugcccggcgccuucacccccggcugcagcaagacccaccugcccggcuucguggagcaggccgaggcccugaaggccaagggcgugcaggugguggccugccugagcgugaacgacgccuucgugaccggcgaguggggcagagcccacaaggccgagggcaaggugagacugcuggccgaccccaccggcgccuucggcaaggagaccgaccugcugcuggacgacagccuggugagcaucuucggcaacagaagacugaagagauucagcaugguggugcaggacggcaucgugaaggcccugaacguggagcccgacggcaccggccugaccugcagccuggcccccaacaucaucagccagcuguga

SEQ ID NO: 2930 - RNA, 309 nt, Artificial Sequence
  AAA63250 variant
auggugagauacagagugagaagccugagcgagagaagccacgagguguacagacagcagcugcacggccaggagcagggccaccacggccaggaggagcagggccugagccccgagcacguggagguguacgagagaacccacggccagagccacuacagaagaagacacugcagcagaagaagacugcacagaauccacagaagacagcacagaagcugcagaagaagaaagagaagaagcugcagacacagaagaagacacagaagaggcugcagaaccagaaagagaaccugcagaagacacuga

SEQ ID NO: 2931 - RNA, 1662 nt, Artificial Sequence
  AAH50416 variant
auggugcagagacugugggugagcagacugcugagacacagaaaggcccagcugcugcuggugaaccugcugaccuucggccuggaggugugccuggccgccggcaucaccuacgugcccccccugcugcuggaggugggcguggaggagaaguucaugaccauggugcugggcaucggccccgugcugggccuggugugcgugccccugcugggcagcgccagcgaccacuggagaggcagauacggcagaagaagacccuucaucugggcccugagccugggcauccugcugagccuguuccugauccccagagccggcuggcuggccggccugcugugccccgaccccagaccccuggagcuggcccugcugauccugggcgugggccugcuggacuucugcggccaggugugcuucaccccccuggaggcccugcugagcgaccuguucagagaccccgaccacugcagacaggccuacagcguguacgccuucaugaucagccugggcggcugccugggcuaccugcugcccgccaucgacugggacaccagcgcccuggcccccuaccugggcacccaggaggagugccuguucggccugcugacccugaucuuccugaccugcguggccgccacccugcugguggccgaggaggccgcccugggccccaccgagcccgccgagggccugagcgcccccagccugagcccccacugcugccccugcagagccagacuggccuucagaaaccugggcgcccugcugcccagacugcaccagcugugcugcagaaugcccagaacccugagaagacuguucguggccgagcugugcagcuggauggcccugaugaccuucacccuguucuacaccgacuucgugggcgagggccuguaccagggcgugcccagagccgagcccggcaccgaggccagaagacacuacgacgagggcgugagaaugggcagccugggccuguuccugcagugcgccaucagccugguguucagccuggugauggacagacuggugcagagauucggcaccagagccguguaccuggccagcguggccgccuuccccguggccgccggcgccaccugccugagccacagcguggccguggugaccgccagcgccgcccugaccggcuucaccuucagcgcccugcagauccugcccuacacccuggccagccuguaccacagagagaagcagguguuccugcccaaguacagaggcgacaccggcggcgccagcagcgaggacagccugaugaccagcuuccugcccggccccaagcccggcgcccccuuccccaacggccacgugggcgccggcggcagcggccugcugccccccccccccgcccugugcggcgccagcgccugcgacgugagcgugagagugguggugggcgagcccaccgaggccagaguggugcccggcagaggcaucugccuggaccuggccauccuggacagcgccuuccugcugagccagguggcccccagccuguucaugggcagcaucgugcagcugagccagagcgugaccgccuacauggugagcgccgccggccugggccugguggccaucuacuucgccacccaggugguguucgacaagagcgaccuggccaaguacagcgccuga

SEQ ID NO: 2932 - RNA, 648 nt, Artificial Sequence
  CBI83574 variant
auggccagccugcagaugagaggcaaccccggcagccacuucugcggcggcacccugauccaccccagcuucgugcugaccgccgcccacugccugagagacaucccccagagacuggugaacguggugcugggcgcccacaacgugagaacccaggagcccacccagcagcacuucagcguggcccagguguuccugaacaacuacgacgccgagaacaagcugaacgacauccugcugauccagcugagcagccccgccaaccugagcgccagcguggccaccgugcagcugccccagcaggaccagcccgugccccacggcacccagugccuggccaugggcuggggcagagugggcgcccacgacccccccgcccaggugcugcaggagcugaacgugaccguggugaccuucuucugcagaccccacaacaucugcaccuucgugcccagaagaaaggccggcaucugcuucggcgacagcggcggcccccugaucugcgacggcaucauccagggcaucgacagcuucgugaucuggggcugcgccaccagacuguuccccgacuucuucaccagaguggcccuguacguggacuggaucagaagcacccugagaagaguggaggccaagggcagacccuga

SEQ ID NO: 2933 - RNA, 771 nt, Artificial Sequence
  AAH96183 variant
auggcccacagaccccccagccccgcccuggccagcgugcugcuggcccugcugcugagcggcgccgccagagccgccgagaucgugggcggccacgaggcccagccccacagcagacccuacauggccagccugcagaugagaggcaaccccggcagccacuucugcggcggcacccugauccaccccagcuucgugcugaccgccgcccacugccugagagacaucccccagagacuggugaacguggugcugggcgcccacaacgugagaacccaggagcccacccagcagcacuucagcguggcccagguguuccugaacaacuacgacgccgagaacaagcugaacgacgugcugcugauccagcugagcagccccgccaaccugagcgccagcguggccaccgugcagcugccccagcaggaccagcccgugccccacggcacccagugccuggccaugggcuggggcagagugggcgcccacgacccccccgcccaggugcugcaggagcugaacgugaccguggugaccuucuucugcagaccccacaacaucugcaccuucgugcccagaagaaaggccggcaucugcuucggcgacagcggcggcccccugaucugcgacggcaucauccagggcaucgacagcuucgugaucuggggcugcgccaccagacuguuccccgacuucuucaccagaguggcccuguacguggacuggaucagaagcacccugagaagaguggaggccaagggcagacccuga

SEQ ID NO: 2934 - RNA, 2760 nt, Artificial Sequence
  CCDS45721.1 variant
auguggcuggccgccgccgcccccagccuggccagaagacugcuguuccugggcccccccccccccccccugcugcugcugguguucagcagaagcagcagaagaagacugcacagccugggccuggccgccaugcccgagaagagacccuucgagagacugcccgccgacgugagccccaucaacuacagccugugccugaagcccgaccugcuggacuucaccuucgagggcaagcuggaggccgccgcccaggugagacaggccaccaaccagaucgugaugaacugcgccgacaucgacaucaucaccgccagcuacgcccccgagggcgacgaggagauccacgccaccggcuucaacuaccagaacgaggacgagaaggugacccugagcuuccccagcacccugcagaccggcaccggcacccugaagaucgacuucgugggcgagcugaacgacaagaugaagggcuucuacagaagcaaguacaccacccccagcggcgaggugagauacgccgccgugacccaguucgaggccaccgacgccagaagagccuuccccugcugggacgagcccgccaucaaggccaccuucgacaucagccugguggugcccaaggacagaguggcccugagcaacaugaacgugaucgacagaaagcccuaccccgacgacgagaaccugguggaggugaaguucgccagaacccccgugaugagcaccuaccugguggccuucguggugggcgaguacgacuucguggagaccagaagcaaggacggcgugugcgugagaguguacacccccgugggcaaggccgagcagggcaaguucgcccuggagguggccgccaagacccugcccuucuacaaggacuacuucaacgugcccuacccccugcccaagaucgaccugaucgccaucgccgacuucgccgccggcgccauggagaacuggggccuggugaccuacagagagaccgcccugcugaucgaccccaagaacagcugcagcagcagcagacaguggguggcccugguggugggccacgagcuggcccaccagugguucggcaaccuggugaccauggagugguggacccaccuguggcugaacgagggcuucgccagcuggaucgaguaccugugcguggaccacugcuuccccgaguacgacaucuggacccaguucgugagcgccgacuacaccagagcccaggagcuggacgcccuggacaacagccaccccaucgaggugagcgugggccaccccagcgagguggacgagaucuucgacgccaucagcuacagcaagggcgccagcgugaucagaaugcugcacgacuacaucggcgacaaggacuucaagaagggcaugaacauguaccugaccaaguuccagcagaagaacgccgccaccgaggaccugugggagagccuggagaacgccagcggcaagcccaucgccgccgugaugaacaccuggaccaagcagaugggcuucccccugaucuacguggaggccgagcagguggaggacgacagacugcugagacugagccagaagaaguucugcgccggcggcagcuacgugggcgaggacugcccccaguggauggugcccaucaccaucagcaccagcgaggaccccaaccaggccaagcugaagauccugauggacaagcccgagaugaacguggugcugaagaacgugaagcccgaccagugggugaagcugaaccugggcaccgugggcuucuacagaacccaguacagcagcgccaugcuggagagccugcugcccggcaucagagaccugagccugccccccguggacagacugggccugcagaacgaccuguucagccuggccagagccggcaucaucagcaccguggaggugcugaaggugauggaggccuucgugaacgagcccaacuacaccguguggagcgaccugagcugcaaccugggcauccugagcacccugcugagccacaccgacuucuacgaggagauccaggaguucgugaaggacguguucagccccaucggcgagagacugggcugggaccccaagcccggcgagggccaccuggacgcccugcugagaggccuggugcugggcaagcugggcaaggccggccacaaggccacccuggaggaggccagaagaagauucaaggaccacguggagggcaagcagauccugagcgccgaccugagaagccccguguaccugaccgugcugaagcacggcgacggcaccacccuggacaucaugcugaagcugcacaagcaggccgacaugcaggaggagaagaacagaaucgagagagugcugggcgccacccugcugcccgaccugauccagaaggugcugaccuucgcccugagcgaggaggugagaccccaggacaccgugagcgugaucggcggcguggccggcggcagcaagcacggcagaaaggccgccuggaaguucaucaaggacaacugggaggagcuguacaacagauaccagggcggcuuccugaucagcagacugaucaagcugagcguggagggcuucgccguggacaagauggccggcgaggugaaggccuucuucgagagccaccccgcccccagcgccgagagaaccauccagcagugcugcgagaacauccugcugaacgccgccuggcugaagagagacgccgagagcauccaccaguaccugcugcagagaaaggccagcccccccaccguguga

SEQ ID NO: 2935 - RNA, 660 nt, Artificial Sequence
  AAH65513 variant
augcugagagccggcgcccccaccggcgaccugcccagagccggcgaggugcacaccggcaccaccaucauggccguggaguucgacggcggcguggugaugggcagcgacagcagagugagcgccggcgaggccguggugaacagaguguucgacaagcugagcccccugcacgagagaaucuacugcgcccugagcggcagcgccgccgacgcccaggccguggccgacauggccgccuaccagcuggagcugcacggcaucgagcuggaggagcccccccuggugcuggccgccgccaacguggugagaaacaucagcuacaaguacagagaggaccugagcgcccaccugaugguggccggcugggaccagagagagggcggccagguguacggcacccugggcggcaugcugaccagacagcccuucgccaucggcggcagcggcagcaccuucaucuacggcuacguggacgccgccuacaagcccggcaugagccccgaggagugcagaagauucaccaccgacgccaucgcccuggccaugagcagagacggcagcagcggcggcgugaucuaccuggugaccaucaccgccgccggcguggaccacagagugauccugggcaacgagcugcccaaguucuacgacgaguga

SEQ ID NO: 2936 - RNA, 345 nt, Artificial Sequence
  EAW82312 variant
auggccggccuggcccugcagcccggcaccgcccugcugugcuacagcugcaaggcccaggugagcaacgaggacugccugcagguggagaacugcacccagcugggcgagcagugcuggaccgccagaaucagagccgugggccugcugaccgugaucagcaagggcugcagccugaacugcguggacgacagccaggacuacuacgugggcaagaagaacaucaccugcugcgacaccgaccugugcaacgccagcggcgcccacgcccugcagcccgccgccgccauccuggcccugcugcccgcccugggccugcugcuguggggccccggccagcuguga

SEQ ID NO: 2937 - RNA, 372 nt, Artificial Sequence
  AAC39607 variant
augaaggccgugcugcuggcccugcugauggccggccuggcccugcagcccggcaccgcccugcugugcuacagcugcaaggcccaggugagcaacgaggacugccugcagguggagaacugcacccagcugggcgagcagugcuggaccgccagaaucagagccgugggccugcugaccgugaucagcaagggcugcagccugaacugcguggacgacagccaggacuacuacgugggcaagaagaacaucaccugcugcgacaccgaccugugcaacgccagcggcgcccacgcccugcagcccgccgccgccauccuggcccugcugcccgcccugggccugcugcuguggggccccggccagcuguga

SEQ ID NO: 2938 - RNA, 963 nt, Artificial Sequence
  AAG40776 variant
augagcagcugcaacuucacccacgccaccuucgugcugaucggcauccccggccuggagaaggcccacuucugggugggcuucccccugcugagcauguacgugguggccauguucggcaacugcaucgugguguucaucgugagaaccgagagaagccugcacgcccccauguaccuguuccugugcaugcuggccgccaucgaccuggcccugagcaccagcaccaugcccaagauccuggcccuguucugguucgacagcagagagaucagcuucgaggccugccugacccagauguucuucauccacgcccugagcgccaucgagagcaccauccugcuggccauggccuucgacagauacguggccaucugccacccccugagacacgccgccgugcugaacaacaccgugaccgcccagaucggcaucguggccguggugagaggcagccuguucuucuucccccugccccugcugaucaagagacuggccuucugccacagcaacgugcugagccacagcuacugcgugcaccaggacgugaugaagcuggccuacgccgacacccugcccaacgugguguacggccugaccgccauccugcuggugaugggcguggacgugauguucaucagccugagcuacuuccugaucaucagaaccgugcugcagcugcccagcaagagcgagagagccaaggccuucggcaccugcgugagccacaucggcguggugcuggccuucuacgugccccugaucggccugagcguggugcacagauucggcaacagccugcaccccaucgugagaguggugaugggcgacaucuaccugcugcugccccccgugaucaaccccaucaucuacggcgccaagaccaagcagaucagaaccagagugcuggccauguucaagaucagcugcgacaaggaccugcaggccgugggcggcaaguga

SEQ ID NO: 2939 - RNA, 2253 nt, Artificial Sequence
  AAA60209 variant
auguggaaccugcugcacgagaccgacagcgccguggccaccgccagaagacccagauggcugugcgccggcgcccuggugcuggccggcggcuucuuccugcugggcuuccuguucggcugguucaucaagagcagcaacgaggccaccaacaucacccccaagcacaacaugaaggccuuccuggacgagcugaaggccgagaacaucaagaaguuccuguacaacuucacccagaucccccaccuggccggcaccgagcagaacuuccagcuggccaagcagauccagagccaguggaaggaguucggccuggacagcguggagcuggcccacuacgacgugcugcugagcuaccccaacaagacccaccccaacuacaucagcaucaucaacgaggacggcaacgagaucuucaacaccagccuguucgagccccccccccccggcuacgagaacgugagcgacaucgugccccccuucagcgccuucagcccccagggcaugcccgagggcgaccugguguacgugaacuacgccagaaccgaggacuucuucaagcuggagagagacaugaagaucaacugcagcggcaagaucgugaucgccagauacggcaagguguucagaggcaacaaggugaagaacgcccagcuggccggcgccaagggcgugauccuguacagcgaccccgccgacuacuucgcccccggcgugaagagcuaccccgacggcuggaaccugcccggcggcggcgugcagagaggcaacauccugaaccugaacggcgccggcgacccccugacccccggcuaccccgccaacgaguacgccuacagaagaggcaucgccgaggccgugggccugcccagcauccccgugcaccccaucggcuacuacgacgcccagaagcugcuggagaagaugggcggcagcgccccccccgacagcagcuggagaggcagccugaaggugcccuacaacgugggccccggcuucaccggcaacuucagcacccagaaggugaagaugcacauccacagcaccaacgaggugaccagaaucuacaacgugaucggcacccugagaggcgccguggagcccgacagauacgugauccugggcggccacagagacagcuggguguucggcggcaucgacccccagagcggcgccgccguggugcacgagaucgugagaagcuucggcacccugaagaaggagggcuggagacccagaagaaccauccuguucgccagcugggacgccgaggaguucggccugcugggcagcaccgagugggccgaggagaacagcagacugcugcaggagagaggcguggccuacaucaacgccgacagcagcaucgagggcaacuacacccugagaguggacugcaccccccugauguacagccuggugcacaaccugaccaaggagcugaagagccccgacgagggcuucgagggcaagagccuguacgagagcuggaccaagaagagccccagccccgaguucagcggcaugcccagaaucagcaagcugggcagcggcaacgacuucgagguguucuuccagagacugggcaucgccagcggcagagccagauacaccaagaacugggagaccaacaaguucagcggcuacccccuguaccacagcguguacgagaccuacgagcugguggagaaguucuacgaccccauguucaaguaccaccugaccguggcccaggugagaggcggcaugguguucgagcuggccaacagcaucgugcugcccuucgacugcagagacuacgccguggugcugagaaaguacgccgacaagaucuacagcaucagcaugaagcacccccaggagaugaagaccuacagcgugagcuucgacagccuguucagcgccgugaagaacuucaccgagaucgccagcaaguucagcgagagacugcaggacuucgacaagagcaaccccaucgugcugagaaugaugaacgaccagcugauguuccuggagagagccuucaucgacccccugggccugcccgacagacccuucuacagacacgugaucuacgcccccagcagccacaacaaguacgccggcgagagcuuccccggcaucuacgacgcccuguucgacaucgagagcaagguggaccccagcaaggccuggggcgaggugaagagacagaucuacguggccgccuucaccgugcaggccgccgccgagacccugagcgagguggccuga

SEQ ID NO: 2940 - RNA, 3921 nt, Artificial Sequence
  CCDS1397.2 variant
augaccauguaccuguggcugaagcugcuggccuucggcuucgccuuccuggacaccgagguguucgugaccggccagagccccacccccagccccaccggccugaccaccgccaagaugcccagcgugccccugagcagcgacccccugcccacccacaccaccgccuucagccccgccagcaccuucgagagagagaacgacuucagcgagaccaccaccagccugagccccgacaacaccagcacccaggugagccccgacagccuggacaacgccagcgccuucaacaccaccggcgugagcagcgugcagaccccccaccugcccacccacgccgacagccagacccccagcgccggcaccgacacccagaccuucagcggcagcgccgccaacgccaagcugaaccccacccccggcagcaacgccaucagcgacgugcccggcgagagaagcaccgccagcaccuuccccaccgaccccgugagcccccugaccaccacccugagccuggcccaccacagcagcgccgcccugcccgccagaaccagcaacaccaccaucaccgccaacaccagcgacgccuaccugaacgccagcgagaccaccacccugagccccagcggcagcgccgugaucagcaccaccaccaucgccaccacccccagcaagcccaccugcgacgagaaguacgccaacaucaccguggacuaccuguacaacaaggagaccaagcuguucaccgccaagcugaacgugaacgagaacguggagugcggcaacaacaccugcaccaacaacgaggugcacaaccugaccgagugcaagaacgccagcgugagcaucagccacaacagcugcaccgcccccgacaagacccugauccuggacgugccccccggcguggagaaguuccagcugcacgacugcacccagguggagaaggccgacaccaccaucugccugaaguggaagaacaucgagaccuucaccugcgacacccagaacaucaccuacagauuccagugcggcaacaugaucuucgacaacaaggagaucaagcuggagaaccuggagcccgagcacgaguacaagugcgacagcgagauccuguacaacaaccacaaguucaccaacgccagcaagaucaucaagaccgacuucggcagccccggcgagccccagaucaucuucugcagaagcgaggccgcccaccagggcgugaucaccuggaaccccccccagagaagcuuccacaacuucacccugugcuacaucaaggagaccgagaaggacugccugaaccuggacaagaaccugaucaaguacgaccugcagaaccugaagcccuacaccaaguacgugcugagccugcacgccuacaucaucgccaaggugcagagaaacggcagcgccgccaugugccacuucaccaccaagagcgccccccccagccagguguggaacaugaccgugagcaugaccagcgacaacagcaugcacgugaagugcagaccccccagagacagaaacggcccccacgagagauaccaccuggagguggaggccggcaacacccuggugagaaacgagagccacaagaacugcgacuucagagugaaggaccugcaguacagcaccgacuacaccuucaaggccuacuuccacaacggcgacuaccccggcgagcccuucauccugcaccacagcaccagcuacaacagcaaggcccugaucgccuuccuggccuuccugaucaucgugaccagcaucgcccugcugguggugcuguacaagaucuacgaccugcacaagaagagaagcugcaaccuggacgagcagcaggagcugguggagagagacgacgagaagcagcugaugaacguggagcccauccacgccgacauccugcuggagaccuacaagagaaagaucgccgacgagggcagacuguuccuggccgaguuccagagcauccccagaguguucagcaaguuccccaucaaggaggccagaaagcccuucaaccagaacaagaacagauacguggacauccugcccuacgacuacaacagaguggagcugagcgagaucaacggcgacgccggcagcaacuacaucaacgccagcuacaucgacggcuucaaggagcccagaaaguacaucgccgcccagggccccagagacgagaccguggacgacuucuggagaaugaucugggagcagaaggccaccgugaucgugauggugaccagaugcgaggagggcaacagaaacaagugcgccgaguacuggcccagcauggaggagggcaccagagccuucggcgacgugguggugaagaucaaccagcacaagagaugccccgacuacaucauccagaagcugaacaucgugaacaagaaggagaaggccaccggcagagaggugacccacauccaguucaccagcuggcccgaccacggcgugcccgaggacccccaccugcugcugaagcugagaagaagagugaacgccuucagcaacuucuucagcggccccaucguggugcacugcagcgccggcgugggcagaaccggcaccuacaucggcaucgacgccaugcuggagggccuggaggccgagaacaagguggacguguacggcuacguggugaagcugagaagacagagaugccugauggugcagguggaggcccaguacauccugauccaccaggcccugguggaguacaaccaguucggcgagaccgaggugaaccugagcgagcugcaccccuaccugcacaacaugaagaagagagacccccccagcgagcccagcccccuggaggccgaguuccagagacugcccagcuacagaagcuggagaacccagcacaucggcaaccaggaggagaacaagagcaagaacagaaacagcaacgugauccccuacgacuacaacagagugccccugaagcacgagcuggagaugagcaaggagagcgagcacgacagcgacgagagcagcgacgacgacagcgacagcgaggagcccagcaaguacaucaacgccagcuucaucaugagcuacuggaagcccgaggugaugaucgccgcccagggcccccugaaggagaccaucggcgacuucuggcagaugaucuuccagagaaaggugaaggugaucgugaugcugaccgagcugaagcacggcgaccaggagaucugcgcccaguacuggggcgagggcaagcagaccuacggcgacaucgagguggaccugaaggacaccgacaagagcagcaccuacacccugagaguguucgagcugagacacagcaagagaaaggacagcagaaccguguaccaguaccaguacaccaacuggagcguggagcagcugcccgccgagcccaaggagcugaucagcaugauccagguggugaagcagaagcugccccagaagaacagcagcgagggcaacaagcaccacaagagcaccccccugcugauccacugcagagacggcagccagcagaccggcaucuucugcgcccugcugaaccugcuggagagcgccgagaccgaggaggugguggacaucuuccagguggugaaggcccugagaaaggccagacccggcauggugagcaccuucgagcaguaccaguuccuguacgacgugaucgccagcaccuaccccgcccagaacggccaggugaagaagaacaaccaccaggaggacaagaucgaguucgacaacgagguggacaaggugaagcaggacgccaacugcgugaacccccugggcgcccccgagaagcugcccgaggccaaggagcaggccgagggcagcgagcccaccagcggcaccgagggccccgagcacagcgugaacggccccgccagccccgcccugaaccagggcagcuga

SEQ ID NO: 2941 - RNA, 624 nt, Artificial Sequence
  AAH02977 variant
auggccaagaccuacgacuaccuguucaagcugcugcugaucggcgacagcggcgugggcaagaccugcgugcuguucagauucagcgaggacgccuucaacagcaccuucaucagcaccaucggcaucgacuucaagaucagaaccaucgagcuggacggcaagagaaucaagcugcagaucugggacaccgccggccaggagagauucagaaccaucaccaccgccuacuacagaggcgccaugggcaucaugcugguguacgacaucaccaacgagaagagcuucgacaacaucagaaacuggaucagaaacaucgaggagcacgccagcgccgacguggagaagaugauccugggcaacaagugcgacgugaacgacaagagacaggugagcaaggagagaggcgagaagcuggcccuggacuacggcaucaaguucauggagaccagcgccaaggccaacaucaacguggagaacgccuucuucacccuggccagagacaucaaggccaagauggacaagaagcuggagggcaacagcccccagggcagcaaccagggcgugaagaucacccccgaccagcagaagagaagcagcuucuucagaugcgugcugcuguga

SEQ ID NO: 2942 - RNA, 1260 nt, Artificial Sequence
  BAA81688 variant
augaagaacuacaaggccaucggcaagaucggcgagggcaccuucagcgaggugaugaagaugcagagccugagagacggcaacuacuacgccugcaagcagaugaagcagagauucgagagcaucgagcaggugaacaaccugagagagauccaggcccugagaagacugaacccccaccccaacauccugaugcugcacgaggugguguucgacagaaagagcggcagccuggcccugaucugcgagcugauggacaugaacaucuacgagcugaucagaggcagaagauacccccugagcgagaagaagaucaugcacuacauguaccagcugugcaagagccuggaccacauccacagaaacggcaucuuccacagagacgugaagcccgagaacauccugaucaagcaggacgugcugaagcugggcgacuucggcagcugcagaagcguguacagcaagcagcccuacaccgaguacaucagcaccagaugguacagagcccccgagugccugcugaccgacggcuucuacaccuacaagauggaccuguggagcgccggcugcguguucuacgagaucgccagccugcagccccuguuccccggcgugaacgagcuggaccagaucagcaagauccacgacgugaucggcacccccgcccagaagauccugaccaaguucaagcagagcagagccaugaacuucgacuuccccuucaagaagggcagcggcaucccccugcugaccaccaaccugagcccccagugccugagccugcugcacgccaugguggccuacgaccccgacgagagaaucgccgcccaccaggcccugcagcaccccuacuuccaggagcagagaaagaccgagaagagagcccugggcagccacagaaaggccggcuuccccgagcaccccguggcccccgagccccugagcaacagcugccagaucagcaaggagggcagaaagcagaagcagagccugaagcaggaggaggacagacccaagagaagaggccccgccuacgugauggagcugcccaagcugaagcugagcggcguggugagacugagcagcuacagcagccccacccugcagagcgugcugggcagcggcaccaacggcagagugcccgugcugagaccccugaagugcauccccgccagcaagaagaccgacccccagaaggaccugaagcccgccccccagcagugcagacugcccaccaucgugagaaagggcggcagauga

SEQ ID NO: 2943 - RNA, 1389 nt, Artificial Sequence
  AAH08727 variant
auggccagcaacagcagcagcugccccacccccggcggcggccaccugaacggcuaccccgugccccccuacgccuucuucuucccccccaugcugggcggccugagcccccccggcgcccugaccacccugcagcaccagcugcccgugagcggcuacagcacccccagccccgccaccaucgagacccagagcagcagcagcgaggagaucgugcccagcccccccagcccccccccccugcccagaaucuacaagcccugcuucgugugccaggacaagagcagcggcuaccacuacggcgugagcgccugcgagggcugcaagggcuucuucagaagaagcauccagaagaacaugguguacaccugccacagagacaagaacugcaucaucaacaaggugaccagaaacagaugccaguacugcagacugcagaagugcuucgaggugggcaugagcaaggagagcgugagaaacgacagaaacaagaagaagaaggaggugcccaagcccgagugcagcgagagcuacacccugacccccgaggugggcgagcugaucgagaaggugagaaaggcccaccaggagaccuuccccgcccugugccagcugggcaaguacaccaccaacaacagcagcgagcagagagugagccuggacaucgaccugugggacaaguucagcgagcugagcaccaagugcaucaucaagaccguggaguucgccaagcagcugcccggcuucaccacccugaccaucgccgaccagaucacccugcugaaggccgccugccuggacauccugauccugagaaucugcaccagauacacccccgagcaggacaccaugaccuucagcgacggccugacccugaacagaacccagaugcacaacgccggcuucggcccccugaccgaccugguguucgccuucgccaaccagcugcugccccuggagauggacgacgccgagaccggccugcugagcgccaucugccugaucugcggcgacagacaggaccuggagcagcccgacagaguggacaugcugcaggagccccugcuggaggcccugaagguguacgugagaaagagaagacccagcagaccccacauguuccccaagaugcugaugaagaucaccgaccugagaagcaucagcgccaagggcgccgagagagugaucacccugaagauggagauccccggcagcaugcccccccugauccaggagaugcuggagaacagcgagggccuggacacccugagcggccagcccggcggcggcggcagagacggcggcggccuggcccccccccccggcagcugcagccccagccugagccccagcagcaacagaagcagccccgccacccacagccccuga

SEQ ID NO: 2944 - RNA, 570 nt, Artificial Sequence
  AAB02605 variant
augaccgaguacaagcuggugguggugggcgccggcggcgugggcaagagcgcccugaccauccagcugauccagaaccacuucguggacgaguacgaccccaccaucgaggacagcuacagaaagcagguggugaucgacggcgagaccugccugcuggacauccuggacaccgccggccaggaggaguacagcgccaugagagaccaguacaugagaaccggcgagggcuuccugugcguguucgccaucaacaacaccaagagcuucgaggacauccaccaguacagagagcagaucaagagagugaaggacagcgacgacgugcccauggugcuggugggcaacaagugcgaccuggccgccagaaccguggagagcagacaggcccaggaccuggccagaagcuacggcauccccuacaucgagaccagcgccaagaccagacagggcguggaggacgccuucuacacccuggugagagagaucagacagcacaagcugagaaagcugaacccccccgacgagagcggccccggcugcaugagcugcaagugcgugcugagcuga

SEQ ID NO: 2945 - RNA, 570 nt, Artificial Sequence
  AAB59445 variant
augaccgaguacaagcuggugguggugggcgccggcggcgugggcaagagcgcccugaccauccagcugauccagaaccacuucguggacgaguacgaccccaccaucgaggacagcuacagaaagcagguggugaucgacggcgagaccugccugcuggacauccuggacaccgccggccaggaggaguacagcgccaugagagaccaguacaugagaaccggcgagggcuuccugugcguguucgccaucaacaacaccaagagcuucgaggacauccaccacuacagagagcagaucaagagagugaaggacagcgaggacgugcccauggugcuggugggcaacaagugcgaccugcccagcagaaccguggacaccaagcaggcccaggaccuggccagaagcuacggcauccccuucaucgagaccagcgccaagaccagacagagaguggaggacgccuucuacacccuggugagagagaucagacaguacagacugaagaagaucagcaaggaggagaagacccccggcugcgugaagaucaagaagugcaucaucauguga

SEQ ID NO: 2946 - RNA, 570 nt, Artificial Sequence
  AAA60255 variant
augaccgaguacaagcuggugguggugggcgccggcggcgugggcaagagcgcccugaccauccagcugauccagaaccacuucguggacgaguacgaccccaccaucgaggacagcuacagaaagcagguggugaucgacggcgagaccugccugcuggacauccuggacaccgccggccaggaggaguacagcgccaugagagaccaguacaugagaaccggcgagggcuuccugugcguguucgccaucaacaacagcaagagcuucgccgacaucaaccuguacagagagcagaucaagagagugaaggacagcgacgacgugcccauggugcuggugggcaacaagugcgaccugcccaccagaaccguggacaccaagcaggcccacgagcuggccaagagcuacggcauccccuucaucgagaccagcgccaagaccagacagggcguggaggacgccuucuacacccuggugagagagaucagacaguacagaaugaagaagcugaacagcagcgacgacggcacccagggcugcaugggccugcccugcguggugauguga

SEQ ID NO: 2947 - RNA, 546 nt, Artificial Sequence
  AAB84001 variant
augugcaagggccuggccgcccugccccacagcugccuggagagagccaaggagaucaagaucaagcugggcauccugcugcagaagcccgacagcgugggcgaccuggugauccccuacaacgagaagcccgagaagcccgccaagacccagaagaccagccuggacgaggcccugcaguggagagacagccuggacaagcugcugcagaacaacuacggccuggccagcuucaagagcuuccugaagagcgaguucagcgaggagaaccuggaguucuggaucgccugcgaggacuacaagaagaucaagagccccgccaagauggccgagaaggccaagcagaucuacgaggaguucauccagaccgaggcccccaaggaggugaacaucgaccacuucaccaaggacaucaccaugaagaaccugguggagcccagccugagcagcuucgacauggcccagaagagaauccacgcccugauggagaaggacagccugcccagauucgugagaagcgaguucuaccaggagcugaucaaguga

SEQ ID NO: 2948 - RNA, 2175 nt, Artificial Sequence
  CCDS4362.1 variant
augagcuuccccaaggccccccugaagagauucaacgaccccagcggcugcgcccccagccccggcgccuacgacgugaagacccuggaggugcugaagggccccgugagcuuccagaagagccagagauucaagcagcagaaggagagcaagcagaaccugaacguggacaaggacaccacccugcccgccagcgccagaaaggugaagagcagcgagagcaaggagagccagaagaacgacaaggaccugaagauccuggagaaggagaucagagugcugcugcaggagagaggcgcccaggacagaagaauccaggaccuggagaccgagcuggagaagauggaggccagacugaacgccgcccugagagagaagaccagccugagcgccaacaacgccacccuggagaagcagcugaucgagcugaccagaaccaacgagcugcugaagagcaaguucagcgagaacggcaaccagaagaaccugagaauccugagccuggagcugaugaagcugagaaacaagagagagaccaagaugagaggcaugauggccaagcaggagggcauggagaugaagcugcaggugacccagagaagccuggaggagagccagggcaagaucgcccagcuggagggcaagcuggugagcaucgagaaggagaagaucgacgagaagagcgagaccgagaagcugcuggaguacaucgaggagaucagcugcgccagcgaccagguggagaaguacaagcuggacaucgcccagcuggaggagaaccugaaggagaagaacgacgagauccugagccugaagcagagccuggaggagaacaucgugauccugagcaagcagguggaggaccugaacgugaagugccagcugcuggagaaggagaaggaggaccacgugaacagaaacagagagcacaacgagaaccugaacgccgagaugcagaaccugaagcagaaguucauccuggagcagcaggagagagagaagcugcagcagaaggagcugcagaucgacagccugcugcagcaggagaaggagcugagcagcagccugcaccagaagcugugcagcuuccaggaggagauggugaaggagaagaaccuguucgaggaggagcugaagcagacccuggacgagcuggacaagcugcagcagaaggaggagcaggccgagagacuggugaagcagcuggaggaggaggccaagagcagagccgaggagcugaagcugcuggaggagaagcugaagggcaaggaggccgagcuggagaagagcagcgccgcccacacccaggccacccugcugcugcaggagaaguacgacagcauggugcagagccuggaggacgugaccgcccaguucgagagcuacaaggcccugaccgccagcgagaucgaggaccugaagcuggagaacagcagccugcaggagaaggccgccaaggccggcaagaacgccgaggacgugcagcaccagauccuggccaccgagagcagcaaccaggaguacgugagaaugcugcuggaccugcagaccaagagcgcccugaaggagaccgagaucaaggagaucaccgugagcuuccugcagaagaucaccgaccugcagaaccagcugaagcagcaggaggaggacuucagaaagcagcuggaggacgaggagggcagaaaggccgagaaggagaacaccaccgccgagcugaccgaggagaucaacaaguggagacugcuguacgaggagcuguacaacaagaccaagcccuuccagcugcagcuggacgccuucgagguggagaagcaggcccugcugaacgagcacggcgccgcccaggagcagcugaacaagaucagagacagcuacgccaagcugcugggccaccagaaccugaagcagaagaucaagcacguggugaagcugaaggacgagaacagccagcugaagagcgaggugagcaagcugagaugccagcuggccaagaagaagcagagcgagaccaagcugcaggaggagcugaacaaggugcugggcaucaagcacuucgaccccagcaaggccuuccaccacgagagcaaggagaacuucgcccugaagaccccccugaaggagggcaacaccaacugcuacagagcccccauggagugccaggagagcuggaaguga

SEQ ID NO: 2949 - RNA, 582 nt, Artificial Sequence
  AAC33179 variant
auggccgccaucagaaagaagcuggugaucgugggcgacggcgccugcggcaagaccugccugcugaucguguucagcaaggaccaguuccccgagguguacgugcccaccguguucgagaacuacaucgccgacaucgagguggacggcaagcagguggagcuggcccugugggacaccgccggccaggaggacuacgacagacugagaccccugagcuaccccgacaccgacgugauccugaugugcuucagcaucgacagccccgacagccuggagaacauccccgagaaguggacccccgaggugaagcacuucugccccaacgugcccaucauccuggugggcaacaagaaggaccugagacaggacgagcacaccagaagagagcuggccaagaugaagcaggagcccgugagaagcgaggagggcagagacauggccaacagaaucagcgccuucggcuaccuggagugcagcgccaagaccaaggagggcgugagagagguguucgagauggccaccagagccggccugcaggugagaaagaacaagagaagaagaggcugccccauccuguga

SEQ ID NO: 2950 - RNA, 888 nt, Artificial Sequence
  AAA36161 variant
augagcggcgcccuggacgugcugcagaugaaggaggaggacgugcugaaguuccuggccgccggcacccaccugggcggcaccaaccuggacuuccagauggagcaguacaucuacaagagaaagagcgacggcaucuacaucaucaaccugaagagaaccugggagaagcugcugcuggccgccagagccaucguggccaucgagaaccccgccgacgugagcgugaucagcagcagaaacaccggccagagagccgugcugaaguucgccgccgccaccggcgccacccccaucgccggcagauucacccccggcaccuucaccaaccagauccaggccgccuucagagagcccagacugcugguggugaccgaccccagagccgaccaccagccccugaccgaggccagcuacgugaaccugcccaccaucgcccugugcaacaccgacagcccccugagauacguggacaucgccauccccugcaacaacaagggcgcccacagcgugggccugaugugguggaugcuggccagagaggugcugagaaugagaggcaccaucagcagagagcaccccugggaggugaugcccgaccuguacuucuacagagaccccgaggagaucgagaaggaggagcaggccgccgccgagaaggccgugaccaaggaggaguuccagggcgaguggaccgcccccgcccccgaguucaccgccacccagcccgagguggccgacuggagcgagggcgugcaggugcccagcgugcccauccagcaguuccccaccgaggacuggagcgcccagcccgccaccgaggacuggagcgccgcccccaccgcccaggccaccgagugggugggcgccaccaccgacuggagcuga

SEQ ID NO: 2951 - RNA, 2601 nt, Artificial Sequence
  AAH14614 variant
augaacggcgagcagcagcuggacgccgacgccggcagcggcauggaggagguggagcugagcugggaggacuaccuggaggagaccggcagcaccgccgugcccuacggcagcuucaagcacguggacaccagacugcagaacggcuucgcccccggcaugaagcuggagguggccgugagaaccgaccccgagaccuacuggguggccaccgugaucaccaccugcgagcagcugcugcugcugagauacgacggcuacggcgaggacagaagagccgacuucuggugcgacaucagaaaggccgaccuguaccccaucggcuggugcgagcagaacaagaagacccuggaggcccccgagggcaucagagacaaggugagcgacugggacgaguuccugagacagacccugaucggcgccugcagcccccccgugccccugcuggagggccugagaaacggcagaaacccccuggaccugaucgcccccggcagcagacuggagugccaggccuuccaggacagccugagcaccuggaucgugaccgugguggagaacaucggcggcagacugaagcugagauacgagggccuggagagcagcgacaacuacgagcacuggcuguacuaccuggaccccuuccugcaccacgugggcugggccgcccagcagggcuacgagcugcagccccccagcgccaucagacaccugaagaacgaggccgaguggcaggagauccuggccaaggugaaggaggaggaggaggagccccugcccagcuaccuguucaaggacaagcaggugaucggcauccacaccuucagcgugaacaugaagcuggaggccguggaccccuggagccccuucggcaucagccccgccaccguggugaagguguucgacgagaaguacuuccugguggagauggacgaccugagacccgagaaccacgccagaagaagcuucgugugccacgccgacagccccggcaucuuccccgugcaguggagccugaagaacggccugcacaucagccccccccccggcuaccccagccaggacuucgacugggccgacuaccugaagcagugcggcgccgaggccgccccccagagaugcuuccccccccugaucagcgagcacgaguucaaggagaacaugaagcuggaggccgugaaccccauccugcccgaggaggugugcguggccaccaucaccgccgugagaggcagcuaccuguggcugcagcuggagggcagcaagaagcccauccccgagugcaucgugagcguggagagcauggacaucuucccccugggcuggugcgagaccaacggccacccccugagcacccccagaagagccagaguguacaagcagagaaagaucgccguggugcagcccgagaagcaggugcccagcagcagaaccgugcacgagggccugagaaaccaggagcugaacagcaccgagagcgugaugaucaacggcaaguacugcugccccaagaucuacuucaaccacagaugcuucagcggccccuaccugaacaagggcagaaucgccgagcugccccagugcgugggccccggcaacugcgugcuggugcugagagaggugcugacccugcugaucaacgccgccuacaagcccagcagagugcugagagagcugcagcuggacaaggacagcguguggcacggcugcggcgaggugcugaaggccaaguacaagggcaagagcuacagagccaccguggagaucgugaagaccgccgacagagugaccgaguucugcagacagaccugcaucaagcuggagugcugccccaaccuguucggccccagaauggugcuggacaagugcagcgagaacugcagcgugcugaccaagaccaaguacacccacuacuacggcaagaagaagaacaagagaaucggcagaccccccggcggccacagcaaccuggccugcgcccugaagaaggccagcaagagaagaaagagaagaaagaacguguucgugcacaagaagaagagaagcagcgccagcguggacaacacccccgccggcagcccccagggcagcggcggcgaggacgaggacgaccccgacgagggcgacgacgacagccugagcgagggcagcaccagcgagcagcaggacgagcugcaggaggagagcgagaugagcgagaagaagagcugcagcagcagccccacccagagcgagaucagcaccagccugccccccgacagacagagaagaaagagagagcugagaaccuucagcuucagcgacgacgagaacaagccccccagccccaaggagaucagaaucgagguggccgagagacugcaccuggacagcaacccccugaaguggagcguggccgacguggugagauucaucagaagcaccgacugcgccccccuggccagaaucuuccuggaccaggagaucgacggccaggcccugcugcugcugacccugcccaccgugcaggagugcauggaccugaagcugggccccgccaucaagcugugccaccacaucgagagaaucaaguucgccuucuacgagcaguucgccaacuga

SEQ ID NO: 2952 - RNA, 1431 nt, Artificial Sequence
  CCDS4550.1 variant
augagcggcagcagcgccagaagcagccaccugagccagcccguggugaagagcgugcugguguacagaaacggcgaccccuucuacgccggcagaagaguggugauccacgagaagaaggugagcagcuucgagguguuccugaaggaggugaccggcggcgugcaggcccccuucggcgccgugagaaacaucuacacccccagaaccggccacagaaucagaaagcuggaccagauccagagcggcggcaacuacguggccggcggccaggaggccuucaagaagcugaacuaccuggacaucggcgagaucaagaagagacccauggagguggugaacaccgaggugaagcccgugauccacagcagaaucaacgugagcgccagauucagaaagccccugcaggagcccugcaccaucuuccugaucgccaacggcgaccugaucaaccccgccagcagacugcugauccccagaaagacccugaaccagugggaccacgugcugcagauggugaccgagaagaucacccugagaagcggcgccgugcacagacuguacacccuggagggcaagcugguggagagcggcgccgagcuggagaacggccaguucuacguggccgugggcagagacaaguucaagaagcugcccuacagcgagcugcuguucgacaagagcaccaugagaagacccuucggccagaaggccagcagccugccccccaucgugggcagcagaaagagcaagggcagcggcaacgacagacacagcaagagcaccgugggcagcagcgacaacagcagcccccagccccugaagagaaagggcaagaaggaggacgugaacagcgagaagcugaccaagcugaagcagaacgugaagcugaagaacagccaggagaccauccccaacagcgacgagggcaucuucaaggccggcgccgagagaagcgagaccagaggcgccgccgaggugcaggaggacgaggacacccagguggaggugcccguggaccagagacccgccgagaucguggacgaggaggaggacggcgagaaggccaacaaggacgccgagcagaaggaggacuucagcggcaugaacggcgaccuggaggaggagggcggcagagaggccaccgacgcccccgagcagguggaggagauccuggaccacagcgagcagcaggccagacccgccagagugaacggcggcaccgacgaggagaacggcgaggagcugcagcaggugaacaacgagcugcagcuggugcuggacaaggagagaaagagccagggcgccggcagcggccaggacgaggccgacguggacccccagagaccccccagacccgaggugaagaucaccagccccgaggagaacgagaacaaccagcagaacaaggacuacgccgccguggccuga

SEQ ID NO: 2953 - RNA, 1362 nt, Artificial Sequence
  BAA07903 variant
augagaauccccguggacgccagcaccagcagaagauucaccccccccagcaccgcccugagccccggcaagaugagcgaggcccugccccugggcgcccccgacgccggcgccgcccuggccggcaagcugagaagcggcgacagaagcaugguggaggugcuggccgaccaccccggcgagcuggugagaaccgacagccccaacuuccugugcagcgugcugcccacccacuggagaugcaacaagacccugcccaucgccuucaaggugguggcccugggcgacgugcccgacggcacccuggugaccgugauggccggcaacgacgagaacuacagcgccgagcugagaaacgccaccgccgccaugaagaaccagguggccagauucaacgaccugagauucgugggcagaagcggcagaggcaagagcuucacccugaccaucaccguguucaccaaccccccccagguggccaccuaccacagagccaucaagaucaccguggacggccccagagagcccagaagacacagacagaagcuggacgaccagaccaagcccggcagccugagcuucagcgagagacugagcgagcuggagcagcugagaagaaccgccaugagagugagcccccaccaccccgcccccacccccaaccccagagccagccugaaccacagcaccgccuucaacccccagccccagagccagaugcaggacaccagacagauccagcccagcccccccuggagcuacgaccagagcuaccaguaccugggcagcaucgccagccccagcgugcaccccgccacccccaucagccccggcagagccagcggcaugaccacccugagcgccgagcugagcagcagacugagcaccgcccccgaccugaccgccuucagcgaccccagacaguuccccgcccugcccagcaucagcgaccccagaaugcacuaccccggcgccuucaccuacagccccacccccgugaccagcggcaucggcaucggcaugagcgccaugggcagcgccaccagauaccacaccuaccugcccccccccuaccccggcagcagccaggcccagggcggccccuuccaggccagcagccccagcuaccaccuguacuacggcgccagcgccggcagcuaccaguucagcauggugggcggcgagagaagcccccccagaauccugccccccugcaccaacgccagcaccggcagcgcccugcugaaccccagccugcccaaccagagcgacgugguggaggccgagggcagccacagcaacagccccaccaacauggcccccagcgccagacuggaggaggccguguggagacccuacuga

SEQ ID NO: 2954 - RNA, 1080 nt, Artificial Sequence
  ACI46041 variant
augccccuggagcuggagcugugccccggcagaugggugggcggccagcaccccugcuucaucaucgccgagaucggccagaaccaccagggcgaccuggacguggccaagagaaugaucagaauggccaaggagugcggcgccgacugcgccaaguuccagaagagcgagcuggaguucaaguucaacagaaaggcccuggagagacccuacaccagcaagcacagcuggggcaagaccuacggcgagcacaagagacaccuggaguucagccacgaccaguacagagagcugcagagauacgccgaggaggugggcaucuucuucaccgccagcggcauggacgagauggccguggaguuccugcacgagcugaacgugcccuucuucaaggugggcagcggcgacaccaacaacuuccccuaccuggagaagaccgccaagaagggcagacccauggugaucagcagcggcaugcagagcauggacaccaugaagcagguguaccagaucgugaagccccugaaccccaacuucugcuuccugcagugcaccagcgccuacccccugcagcccgaggacgugaaccugagagugaucagcgaguaccagaagcuguuccccgacauccccaucggcuacagcggccacgagaccggcaucgccaucagcguggccgccguggcccugggcgccaaggugcuggagagacacaucacccuggacaagaccuggaagggcagcgaccacagcgccagccuggagcccggcgagcuggccgagcuggugagaagcgugagacugguggagagagcccugggcagccccaccaagcagcugcugcccugcgagauggccugcaacgagaagcugggcaagagcgugguggccaaggugaagauccccgagggcaccauccugaccauggacaugcugaccgugaaggugggcgagcccaaggccuacccccccgaggacaucuucaaccuggugggcaagaaggugcuggugaccguggaggaggacgacaccaucauggaggagcugguggacaaccacggcaagaagaucaagagcuga

SEQ ID NO: 2955 - RNA, 2715 nt, Artificial Sequence
  CCDS14652.1 variant
augcaggccagcccccugcagaccagccagcccaccccccccgaggagcugcacgccgccgccuacguguucaccaacgacggccagcagaugagaagcgacgaggugaaccugguggccaccggccaccagagcaagaagaagcacagcagaaagagcaagagacacagcagcagcaagagaagaaagagcaugagcagcuggcuggacaagcaggaggacgccgccgugacccacagcaucugcgaggagagaaucaacaacggccagcccguggccgacaacgugcugagcaccgccccccccuggcccgacgccaccaucgcccacaacaucagagaggagagaauggagaacggccagagcagaaccgacaaggugcugagcaccgcccccccccagcuggugcacauggccgccgccggcauccccagcaugagcaccagagaccugcacagcaccgugacccacaacaucagagaggagagaauggagaacggccagccccagcccgacaacgugcugagcaccggccccaccggccugaucaacauggccgccacccccauccccgccaugagcgccagagaccuguacgccaccgugacccacaacgugugcgagcagaagauggagaacgugcagcccgcccccgacaacgugcugcugacccugagacccagaagaaucaacaugaccgacaccggcaucagccccaugagcaccagagaccccuacgccaccaucaccuacaacgugcccgaggagaagauggagaagggccagccccagcccgacaacauccugagcaccgccagcaccggccugaucaacguggccggcgccggcacccccgccaucagcaccaacggccuguacagcaccgugccccacaacgugugcgaggagaagauggagaacgaccagccccagcccaacaacgugcugagcaccgugcagcccgugaucaucuaccugaccgccaccggcauccccggcaugaacaccagagaccaguacgccaccaucacccacaacgugugcgaggagagaguggugaacaaccagccccugcccagcaacgcccugagcaccgugcugcccggccuggccuaccuggccaccgccgacaugcccgccaugagcaccagagaccagcacgccaccaucauccacaaccugagagaggagaagaaggacaacagccagcccacccccgacaacgugcugagcgccgugacccccgagcugaucaaccuggccggcgccggcaucccccccaugagcaccagagaccaguacgccaccgugaaccaccacgugcacgaggccagaauggagaacggccagagaaagcaggacaacgugcugagcaacgugcugagcggccugaucaacauggccggcgccagcauccccgccaugagcagcagagaccuguacgccaccaucacccacagcgugagagaggagaagauggagagcggcaagccccagaccgacaaggugaucagcaacgacgccccccagcugggccacauggccgccggcggcauccccagcaugagcaccaaggaccuguacgccaccgugacccagaacgugcacgaggagagaauggagaacaaccagccccagcccagcuacgaccugagcaccgugcugcccggccugaccuaccugaccguggccggcauccccgccaugagcaccagagaccaguacgccaccgugacccacaacgugcacgaggagaagaucaagaacggccaggccgccagcgacaacguguucagcaccgugccccccgccuucaucaacauggccgccaccggcgugagcagcaugagcaccagagaccaguacgccgccgugacccacaacaucagagaggagaagaucaacaacagccagcccgcccccggcaacauccugagcaccgccccccccuggcugagacacauggccgccgccggcaucagcagcaccaucaccagagaccuguacgugaccgccacccacagcgugcacgaggagaagaugaccaacggccagcaggcccccgacaacagccugagcaccgugccccccggcugcaucaaccugagcggcgccggcaucagcugcagaagcaccagagaccuguacgccaccgugauccacgacauccaggaggaggagauggagaacgaccagaccccccccgacggcuuccugagcaacagcgacagccccgagcugaucaacaugaccggccacugcaugccccccaacgcccuggacagcuucagccacgacuucaccagccugagcaaggacgagcugcuguacaagcccgacagcaacgaguucgccgugggcaccaagaacuacagcgugagcgccggcgacccccccgugaccgugaugagccugguggagaccgugcccaacaccccccagaucagccccgccauggccaagaagaucaacgacgacaucaaguaccagcugaugaaggaggugagaagauucggccagaacuacgagagaaucuucauccugcuggaggaggugcagggcagcaugaaggugaagagacaguucguggaguucaccaucaaggaggccgccagauucaagaagguggugcugauccagcagcuggagaaggcccugaaggagaucgacagccacugccaccugagaaaggugaagcacaugagaaagagauga

SEQ ID NO: 2956 - RNA, 2403 nt, Artificial Sequence
  AAH01058 variant
augggcagcagcaagaagcacagaggcgagaaggaggccgccggcaccaccgccgccgccggcaccggcggcgccaccgagcagccccccagacacagagagcacaagaagcacaagcacagaagcggcggcagcggcggcagcggcggcgagagaagaaagagaagcagagagagaggcggcgagagaggcagcggcagaagaggcgccgaggccgaggccagaagcagcacccacggcagagagagaagccaggccgagcccagcgagagaagagugaagagagagaagagagacgacggcuacgaggccgccgccagcagcaagaccagcagcggcgacgccagcagccugagcaucgaggagaccaacaagcugagagccaagcugggccugaagccccuggaggugaacgccaucaagaaggaggccggcaccaaggaggagcccgugaccgccgacgugaucaaccccauggcccugagacagagagaggagcugagagagaagcuggccgccgccaaggagaagagacugcugaaccagaagcugggcaagaucaagacccugggcgaggacgaccccuggcuggacgacaccgccgccuggaucgagagaagcagacagcugcagaaggagaaggaccuggccgagaagagagccaagcugcuggaggagauggaccaggaguucggcgugagcacccugguggaggaggaguucggccagagaagacaggaccuguacagcgccagagaccugcagggccugaccguggagcacgccaucgacagcuucagagagggcgagaccaugauccugacccugaaggacaagggcgugcugcaggaggaggaggacgugcuggugaacgugaaccugguggacaaggagagagccgagaagaacguggagcugagaaagaagaagcccgacuaccugcccuacgccgaggacgagagcguggacgaccuggcccagcagaagcccagaagcauccugagcaaguacgacgaggagcuggagggcgagagaccccacagcuucagacuggagcagggcggcaccgccgacggccugagagagagagagcuggaggagaucagagccaagcugagacugcaggcccagagccugagcaccgugggccccagacuggccagcgaguaccugacccccgaggagauggugaccuucaagaagaccaagagaagagugaagaagaucagaaagaaggagaaggaggugguggugagagccgacgaccugcugccccugggcgaccagacccaggacggcgacuucggcagcagacugagaggcagaggcagaagaagagugagcgagguggaggaggagaaggagcccgugccccagccccugcccagcgacgacaccagaguggagaacauggacaucagcgacgaggaggagggcggcgcccccccccccggcagcccccaggugcuggaggaggacgaggccgagcuggagcugcagaagcagcuggagaagggcagaagacugagacagcugcagcagcugcagcagcugagagacagcggcgagaaggugguggagaucgugaagaagcuggagagcagacagagaggcugggaggaggacgaggaccccgagagaaagggcgccaucguguucaacgccaccagcgaguucugcagaacccugggcgagauccccaccuacggccuggccggcaacagagaggagcaggaggagcugauggacuucgagagagacgaggagagaagcgccaacggcggcagcgagagcgacggcgaggagaacaucggcuggagcaccgugaaccuggacgaggagaagcagcagcaggacuucagcgccagcagcaccaccauccuggacgaggagcccaucgugaacagaggccuggccgccgcccugcugcugugccagaacaagggccugcuggagaccaccgugcagaagguggccagagugaaggcccccaacaagagccugcccagcgccguguacugcaucgaggacaagauggccaucgacgacaaguacagcagaagagaggaguacagaggcuucacccaggacuucaaggagaaggacggcuacaagcccgacgugaagaucgaguacguggacgagaccggcagaaagcugacccccaaggaggccuucagacagcugagccacagauuccacggcaagggcagcggcaagaugaagaccgagagaagaaugaagaagcuggacgaggaggcccugcugaagaagaugagcagcagcgacaccccccugggcaccguggcccugcugcaggagaagcagaaggcccagaagacccccuacaucgugcugagcggcagcggcaagagcaugaacgccaacaccaucaccaaguga

SEQ ID NO: 2957 - RNA, 2877 nt, Artificial Sequence
  AAF00087 variant
augagaacccacaccagaggcgcccccagcguguucuucaucuaccugcugugcuucgugagcgccuacaucaccgacgagaaccccgaggugaugauccccuucaccaacgccaacuacgacagccaccccaugcuguacuucagcagagccgagguggccgagcugcagcugagagccgccagcagccacgagcacaucgccgccagacugaccgaggccgugcacaccaugcugagcagcccccuggaguaccugccccccugggaccccaaggacuacagcgccagauggaacgagaucuucggcaacaaccugggcgcccuggccauguucugcgugcuguaccccgagaacaucgaggccagagacauggccaaggacuacauggagagaauggccgcccagcccagcuggcuggugaaggacgcccccugggacgaggugccccuggcccacagccuggugggcuucgccaccgccuacgacuuccuguacaacuaccugagcaagacccagcaggagaaguuccuggaggugaucgccaacgccagcggcuacauguacgagaccagcuacagaagaggcuggggcuuccaguaccugcacaaccaccagcccaccaacugcauggcccugcugaccggcagccuggugcugaugaaccagggcuaccugcaggaggccuaccuguggaccaagcaggugcugaccaucauggagaagagccuggugcugcugagagaggugaccgacggcagccuguacgagggcguggccuacggcagcuacaccaccagaagccuguuccaguacauguuccuggugcagagacacuucaacaucaaccacuucggccaccccuggcugaagcagcacuucgccuucauguacagaaccauccugcccggcuuccagagaaccguggccaucgccgacagcaacuacaacugguucuacggccccgagagccagcugguguuccuggacaaguucgugaugagaaacggcagcggcaacuggcuggccgaccagaucagaagaaacagagugguggagggccccggcacccccagcaagggccagagauggugcacccugcacaccgaguuccugugguacgacggcagccugaagagcgugcccccccccgacuucggcacccccacccugcacuacuucgaggacuggggcguggugaccuacggcagcgcccugcccgccgagaucaacagaagcuuccugagcuucaagagcggcaagcugggcggcagagccaucuacgacaucgugcacagaaacaaguacaaggacuggaucaagggcuggagaaacuucaacgccggccacgagcaccccgaccagaacagcuucaccuucgcccccaacggcgugcccuucaucaccgaggcccuguacggccccaaguacaccuucuucaacaacgugcugauguucagccccgccgugagcaagagcugcuucagccccugggugggccaggugaccgaggacugcagcagcaaguggagcaaguacaagcacgaccuggccgccagcugccagggcagagugguggccgccgaggagaagaacggcgugguguucaucagaggcgagggcgugggcgccuacaacccccagcugaaccugaagaacgugcagagaaaccugauccugcugcacccccagcugcugcugcugguggaccagauccaccugggcgaggagagcccccuggagaccgccgccagcuucuuccacaacguggacgugcccuucgaggagaccgugguggacggcgugcacggcgccuucaucagacagagagacggccuguacaagauguacuggauggacgacaccggcuacagcgagaaggccaccuucgccagcgugaccuaccccagaggcuaccccuacaacggcaccaacuacgugaacgugaccaugcaccugagaagccccaucaccagagccgccuaccuguucaucggccccagcaucgacgugcagagcuucaccgugcacggcgacagccagcagcuggacguguucaucgccaccagcaagcacgccuacgccaccuaccuguggaccggcgaggccaccggccagagcgccuucgcccaggugaucgccgacagacacaagauccuguucgacagaaacagcgccaucaagagcagcaucgugcccgaggugaaggacuacgccgccaucguggagcagaaccugcagcacuucaagcccguguuccagcugcuggagaagcagauccugagcagagugagaaacaccgccagcuucagaaagaccgccgagagacugcugagauucagcgacaagagacagaccgaggaggccaucgacagaaucuucgccaucagccagcagcagcagcagcagagcaagagcaagaagaacagaagagccggcaagagauacaaguucguggacgccgugcccgacaucuucgcccagaucgaggugaacgagaagaagaucagacagaaggcccagauccuggcccagaaggagcugcccaucgacgaggacgaggagaugaaggaccugcuggacuucgccgacgugaccuacgagaagcacaagaacggcggccugaucaagggcagauucggccaggccagaauggugaccaccacccacagcagagcccccagccugagcgccagcuacaccagacuguuccugauccugaacaucgccaucuucuucgugaugcuggccaugcagcugaccuacuuccagagagcccagagccugcacggccagagaugccuguacgccgugcugcugaucgacagcugcauccugcuguggcuguacagcagcugcagccagagccagugcuga

SEQ ID NO: 2958 - RNA, 2892 nt, Artificial Sequence
  AAH93784 variant
auggccaccgccgccgagaccagcgccagcgagcccgaggccgagagcaaggccggccccaaggccgacggcgaggaggacgaggugaaggccgccagaaccagaagaaaggugcugagcagagccguggccgccgccaccuacaagaccaugggccccgccugggaccagcaggaggagggcgugagcgagagcgacggcgacgaguacgccauggccagcagcgccgagagcagccccggcgaguacgagugggaguacgacgaggaggaggagaagaaccagcuggagaucgagagacuggaggagcagcugagcaucaacguguacgacuacaacugccacguggaccugaucagacugcugagacuggagggcgagcugaccaaggugagaauggccagacagaagaugagcgagaucuucccccugaccgaggagcuguggcuggaguggcugcacgacgagaucagcauggcccaggacggccuggacagagagcacguguacgaccuguucgagaaggccgugaaggacuacaucugccccaacaucuggcuggaguacggccaguacagcgugggcggcaucggccagaagggcggccuggagaaggugagaagcguguucgagagagcccugagcagcgugggccugcacaugaccaagggccuggcccugugggaggccuacagagaguucgagagcgccaucguggaggccgccagacuggagaaggugcacagccuguucagaagacagcuggccaucccccuguacgacauggaggccaccuucgccgaguacgaggaguggagcgaggaccccauccccgagagcgugauccagaacuacaacaaggcccugcagcagcuggagaaguacaagcccuacgaggaggcccugcugcaggccgaggcccccagacuggccgaguaccaggccuacaucgacuucgagaugaagaucggcgaccccgccagaauccagcugaucuucgagagagcccugguggagaacugccuggugcccgaccuguggaucagauacagccaguaccuggacagacagcugaaggugaaggaccuggugcugagcgugcacaacagagccaucagaaacugccccuggaccguggcccuguggagcagauaccugcuggccauggagagacacggcguggaccaccaggugaucagcgugaccuucgagaaggcccugaacgccggcuucauccaggccaccgacuacguggagaucuggcaggccuaccuggacuaccugagaagaagaguggacuucaagcaggacagcagcaaggagcuggaggagcugagagccgccuucaccagagcccuggaguaccugaagcaggagguggaggagagauucaacgagagcggcgaccccagcugcgugaucaugcagaacugggccagaaucgaggccagacugugcaacaacaugcagaaggccagagagcugugggacagcaucaugaccagaggcaacgccaaguacgccaacauguggcuggaguacuacaaccuggagagagcccacggcgacacccagcacugcagaaaggcccugcacagagccgugcagugcaccagcgacuaccccgagcacgugugcgaggugcugcugaccauggagagaaccgagggcagccuggaggacugggacaucgccgugcagaagaccgagaccagacuggccagagugaacgagcagagaaugaaggccgccgagaaggaggccgcccuggugcagcaggaggaggagaaggccgagcagagaaagagagccagagccgagaagaaggcccugaagaagaagaagaagaucagaggccccgagaagagaggcgccgacgaggacgacgagaaggaguggggcgacgacgaggaggagcagcccagcaagagaagaagaguggagaacagcauccccgccgccggcgagacccagaacguggagguggccgccggccccgccggcaagugcgccgccguggacguggagccccccagcaagcagaaggagaaggccgccagccugaagagagacaugcccaaggugcugcacgacagcagcaaggacagcaucaccguguucgugagcaaccugcccuacagcaugcaggagcccgacaccaagcugagaccccuguucgaggccugcggcgagguggugcagaucagacccaucuucagcaacagaggcgacuucagaggcuacugcuacguggaguucaaggaggagaagagcgcccugcaggcccuggagauggacagaaagagcguggagggcagacccauguucgugagccccugcguggacaagagcaagaaccccgacuucaagguguucagauacagcaccagccuggagaagcacaagcuguucaucagcggccugcccuucagcugcaccaaggaggagcuggaggagaucugcaaggcccacggcaccgugaaggaccugagacuggugaccaacagagccggcaagcccaagggccuggccuacguggaguacgagaacgagagccaggccagccaggccgugaugaagauggacggcaugaccaucaaggagaacaucaucaagguggccaucagcaaccccccccagagaaaggugcccgagaagcccgagaccagaaaggcccccggcggccccaugcugcugccccagaccuacggcgccagaggcaagggcagaacccagcugagccugcugcccagagcccugcagagacccagcgccgccgccccccaggccgagaacggccccgccgccgcccccgccguggccgcccccgccgccaccgaggcccccaagaugagcaacgccgacuucgccaagcuguuccugagaaaguga

SEQ ID NO: 2959 - RNA, 2283 nt, Artificial Sequence
  AAC51668 variant
augaagaccugggugaagaucguguucggcguggccaccagcgccgugcuggcccugcuggugaugugcaucgugcugagacccagcagagugcacaacagcgaggagaacaccaugagagcccugacccugaaggacauccugaacggcaccuucagcuacaagaccuucuuccccaacuggaucagcggccaggaguaccugcaccagagcgccgacaacaacaucgugcuguacaacaucgagaccggccagagcuacaccauccugagcaacagaaccaugaagagcgugaacgccagcaacuacggccugagccccgacagacaguucguguaccuggagagcgacuacagcaagcuguggagauacagcuacaccgccaccuacuacaucuacgaccugagcaacggcgaguucgugagaggcaacgagcugcccagacccauccaguaccugugcuggagccccgugggcagcaagcuggccuacguguaccagaacaacaucuaccugaagcagagacccggcgacccccccuuccagaucaccuucaacggcagagagaacaagaucuucaacggcauccccgacuggguguacgaggaggagaugcuggccaccaaguacgcccugugguggagccccaacggcaaguuccuggccuacgccgaguucaacgacaccgacauccccgugaucgccuacagcuacuacggcgacgagcaguaccccagaaccaucaacauccccuaccccaaggccggcgccaagaaccccguggugagaaucuucaucaucgacaccaccuaccccgccuacgugggcccccaggaggugcccgugcccgccaugaucgccagcagcgacuacuacuucagcuggcugaccugggugaccgacgagagagugugccugcaguggcugaagagagugcagaacgugagcgugcugagcaucugcgacuucagagaggacuggcagaccugggacugccccaagacccaggagcacaucgaggagagcagaaccggcugggccggcggcuucuucgugagcacccccguguucagcuacgacgccaucagcuacuacaagaucuucagcgacaaggacggcuacaagcacauccacuacaucaaggacaccguggagaacgccauccagaucaccagcggcaagugggaggccaucaacaucuucagagugacccaggacagccuguucuacagcagcaacgaguucgaggaguaccccggcagaagaaacaucuacagaaucagcaucggcagcuacccccccagcaagaagugcgugaccugccaccugagaaaggagagaugccaguacuacaccgccagcuucagcgacuacgccaaguacuacgcccuggugugcuacggccccggcauccccaucagcacccugcacgacggcagaaccgaccaggagaucaagauccuggaggagaacaaggagcuggagaacgcccugaagaacauccagcugcccaaggaggagaucaagaagcuggagguggacgagaucacccugugguacaagaugauccugcccccccaguucgacagaagcaagaaguacccccugcugauccagguguacggcggccccugcagccagagcgugagaagcguguucgccgugaacuggaucagcuaccuggccagcaaggagggcauggugaucgcccugguggacggcagaggcaccgccuuccagggcgacaagcugcuguacgccguguacagaaagcugggcguguacgagguggaggaccagaucaccgccgugagaaaguucaucgagaugggcuucaucgacgagaagagaaucgccaucuggggcuggagcuacggcggcuacgugagcagccuggcccuggccagcggcaccggccuguucaagugcggcaucgccguggcccccgugagcagcugggaguacuacgccagcguguacaccgagagauucaugggccugcccaccaaggacgacaaccuggagcacuacaagaacagcaccgugauggccagagccgaguacuucagaaacguggacuaccugcugauccacggcaccgccgacgacaacgugcacuuccagaacagcgcccagaucgccaaggcccuggugaacgcccagguggacuuccaggccaugugguacagcgaccagaaccacggccugagcggccugagcaccaaccaccuguacacccacaugacccacuuccugaagcagugcuucagccugagcgacuga

SEQ ID NO: 2960 - RNA, 1128 nt, Artificial Sequence
  CCDS32839.1 variant
auggacgcccugcagcuggccaacagcgccuucgccguggaccuguucaagcagcugugcgagaaggagccccugggcaacgugcuguucagccccaucugccugagcaccagccugagccuggcccaggugggcgccaagggcgacaccgccaacgagaucggccaggugcugcacuucgagaacgugaaggacgugcccuucggcuuccagaccgugaccagcgacgugaacaagcugagcagcuucuacagccugaagcugaucaagagacuguacguggacaagagccugaaccugagcaccgaguucaucagcagcaccaagagacccuacgccaaggagcuggagaccguggacuucaaggacaagcuggaggagaccaagggccagaucaacaacagcaucaaggaccugaccgacggccacuucgagaacauccuggccgacaacagcgugaacgaccagaccaagauccugguggugaacgccgccuacuucgugggcaaguggaugaagaaguucagcgagagcgagaccaaggagugccccuucagagugaacaagaccgacaccaagcccgugcagaugaugaacauggaggccaccuucugcaugggcaacaucgacagcaucaacugcaagaucaucgagcugcccuuccagaacaagcaccugagcauguucauccugcugcccaaggacguggaggacgagagcaccggccuggagaagaucgagaagcagcugaacagcgagagccugagccaguggaccaaccccagcaccauggccaacgccaaggugaagcugagcauccccaaguucaagguggagaagaugaucgaccccaaggccugccuggagaaccugggccugaagcacaucuucagcgaggacaccagcgacuucagcggcaugagcgagaccaagggcguggcccugagcaacgugauccacaaggugugccuggagaucaccgaggacggcggcgacagcaucgaggugcccggcgccagaauccugcagcacaaggacgagcugaacgccgaccaccccuucaucuacaucaucagacacaacaagaccagaaacaucaucuucuucggcaaguucugcagccccuga

SEQ ID NO: 2961 - RNA, 1002 nt, Artificial Sequence
  AAH06564 variant
auggccugcagcagaccccccagccagugcgagcccaccagccugccccccggcccccccgccggcagaagacaccugccccugagcagaagaagaagagagaugagcagcaacaaggagcagagaagcgccguguucgugauccuguucgcccugaucaccauccugauccuguacagcagcaacagcgccaacgagguguuccacuacggcagccugagaggcagaagcagaagacccgugaaccugaagaaguggagcaucaccgacggcuacgugcccauccugggcaacaagacccugcccagcagaugccaccagugcgugaucgugagcagcagcagccaccugcugggcaccaagcugggccccgagaucgagagagccgagugcaccaucagaaugaacgacgcccccaccaccggcuacagcgccgacgugggcaacaagaccaccuacagagugguggcccacagcagcguguucagagugcugagaagaccccaggaguucgugaacagaacccccgagaccguguucaucuucuggggcccccccagcaagaugcagaagccccagggcagccuggugagagugauccagagagccggccugguguuccccaacauggaggccuacgccgugagccccggcagaaugagacaguucgacgaccuguucagaggcgagaccggcaaggacagagagaagagccacagcuggcugagcaccggcugguucaccauggugaucgccguggagcugugcgaccacgugcacguguacggcauggugccccccaacuacugcagccagagacccagacugcagagaaugcccuaccacuacuacgagcccaagggccccgacgagugcgugaccuacauccagaacgagcacagcagaaagggcaaccaccacagauucaucaccgagaagagaguguucagcagcugggcccagcuguacggcaucaccuucagccaccccagcuggaccuga

SEQ ID NO: 2962 - RNA, 1071 nt, Artificial Sequence
  AAC37586 variant
augagccccugcggcagagccagaagacagaccagcagaggcgccauggccgugcuggccuggaaguuccccagaaccagacugcccaugggcgccagcgcccugugcgugguggugcugugcuggcuguacaucuuccccguguacagacugcccaacgagaaggagaucgugcagggcgugcugcagcagggcaccgccuggagaagaaaccagaccgccgccagagccuucagaaagcagauggaggacugcugcgaccccgcccaccuguucgccaugaccaagaugaacagccccaugggcaagagcaugugguacgacggcgaguuccuguacagcuucaccaucgacaacagcaccuacagccuguucccccaggccacccccuuccagcugccccugaagaagugcgccguggugggcaacggcggcauccugaagaagagcggcugcggcagacagaucgacgaggccaacuucgugaugagaugcaaccugcccccccugagcagcgaguacaccaaggacgugggcagcaagagccagcuggugaccgccaaccccagcaucaucagacagagauuccagaaccugcuguggagcagaaagaccuucguggacaacaugaagaucuacaaccacagcuacaucuacaugcccgccuucagcaugaagaccggcaccgagcccagccugagaguguacuacacccugagcgacgugggcgccaaccagaccgugcuguucgccaaccccaacuuccugagaagcaucggcaaguucuggaagagcagaggcauccacgccaagagacugagcaccggccuguuccuggugagcgccgcccugggccugugcgaggagguggccaucuacggcuucuggcccuucagcgugaacaugcacgagcagcccaucagccaccacuacuacgacaacgugcugcccuucagcggcuuccacgccaugcccgaggaguuccugcagcugugguaccugcacaagaucggcgcccugagaaugcagcuggaccccugcgaggacaccagccugcagcccaccagcuga

SEQ ID NO: 2963 - RNA, 1257 nt, Artificial Sequence
  BAG50894 variant
augagaaccaaggccgccggcugcgccgagagaagaccccugcagcccagaaccgaggccgccgccgcccccgccggcagagccaugcccagcgaguacaccuacgugaagcugagaagcgacugcagcagacccagccugcagugguacaccagagcccagagcaagaugagaagacccagccugcugcugaaggacauccugaagugcacccugcugguguucggcguguggauccuguacauccugaagcugaacuacaccaccgaggagugcgacaugaagaagaugcacuacguggaccccgaccacgugaagagagcccagaaguacgcccagcaggugcugcagaaggagugcagacccaaguucgccaagaccagcauggcccugcuguucgagcacagauacagcguggaccugcugcccuucgugcagaaggcccccaaggacagcgaggccgagagcaaguacgacccccccuucggcuucagaaaguucagcagcaaggugcagacccugcuggagcugcugcccgagcacgaccugcccgagcaccugaaggccaagaccugcagaagaugcguggugaucggcagcggcggcauccugcacggccuggagcugggccacacccugaaccaguucgacguggugaucagacugaacagcgcccccguggagggcuacagcgagcacgugggcaacaagaccaccaucagaaugaccuaccccgagggcgccccccugagcgaccuggaguacuacagcaacgaccuguucguggccgugcuguucaagagcguggacuucaacuggcugcaggccauggugaagaaggagacccugcccuucugggugagacuguucuucuggaagcagguggccgagaagaucccccugcagcccaagcacuucagaauccugaaccccgugaucaucaaggagaccgccuucgacauccugcaguacagcgagccccagagcagauucuggggcagagacaagaacgugcccaccaucggcgugaucgccguggugcuggccacccaccugugcgacgaggugagccuggccggcuucggcuacgaccugaaccagcccagaaccccccugcacuacuucgacagccagugcauggccgccaugaacuuccagaccaugcacaacgugaccaccgagaccaaguuccugcugaagcuggugaaggagggcguggugaaggaccugagcggcggcaucgacagagaguucuga

SEQ ID NO: 2964 - RNA, 1059 nt, Artificial Sequence
  EAW56837 variant
auggacuuccugagaaaccuguucagccagacccugagccugggcagccagaaggagagacugcuggacgagcugacccuggagggcguggccagauacaugcagagcgagagaugcagaagagugaucugccuggugggcgccggcaucagcaccagcgccggcauccccgacuucagaagccccagcaccggccuguacgacaaccuggagaaguaccaccugcccuaccccgaggccaucuucgagaucagcuacuucaagaagcaccccgagcccuucuucgcccuggccaaggagcuguaccccggccaguucaagcccaccaucugccacuacuucaugagacugcugaaggacaagggccugcugcugagaugcuacacccagaacaucgacacccuggagagaaucgccggccuggagcaggaggaccugguggaggcccacggcaccuucuacaccagccacugcgugagcgccagcugcagacacgaguacccccugagcuggaugaaggagaagaucuucagcgaggugacccccaagugcgaggacugccagagccuggugaagcccgacaucguguucuucggcgagagccugcccgccagauucuucagcugcaugcagagcgacuuccugaagguggaccugcugcuggugaugggcaccagccugcaggugcagcccuucgccagccugaucagcaaggccccccugagcacccccagacugcugaucaacaaggagaaggccggccagagcgaccccuuccugggcaugaucaugggccugggcggcggcauggacuucgacagcaagaaggccuacagagacguggccuggcugggcgagugcgaccagggcugccuggcccuggccgagcugcugggcuggaagaaggagcuggaggaccuggugagaagagagcacgccagcaucgacgcccagagcggcgccggcgugcccaaccccagcaccagcgccagccccaagaagagccccccccccgccaaggacgaggccagaaccaccgagagagagaagccccaguga

SEQ ID NO: 2965 - RNA, 1170 nt, Artificial Sequence
  AAD40850 variant
auggccgagcccgaccccagccacccccuggagacccaggccggcaaggugcaggaggcccaggacagcgacagcgacagcgagggcggcgccgccggcggcgaggccgacauggacuuccugagaaaccuguucagccagacccugagccugggcagccagaaggagagacugcuggacgagcugacccuggagggcguggccagauacaugcagagcgagagaugcagaagagugaucugccuggugggcgccggcaucagcaccagcgccggcauccccgacuucagaagccccagcaccggccuguacgacaaccuggagaaguaccaccugcccuaccccgaggccaucuucgagaucagcuacuucaagaagcaccccgagcccuucuucgcccuggccaaggagcuguaccccggccaguucaagcccaccaucugccacuacuucaugagacugcugaaggacaagggccugcugcugagaugcuacacccagaacaucgacacccuggagagaaucgccggccuggagcaggaggaccugguggaggcccacggcaccuucuacaccagccacugcgugagcgccagcugcagacacgaguacccccugagcuggaugaaggagaagaucuucagcgaggugacccccaagugcgaggacugccagagccuggugaagcccgacaucguguucuucggcgagagccugcccgccagauucuucagcugcaugcagagcgacuuccugaagguggaccugcugcuggugaugggcaccagccugcaggugcagcccuucgccagccugaucagcaaggccccccugagcacccccagacugcugaucaacaaggagaaggccggccagagcgaccccuuccugggcaugaucaugggccugggcggcggcauggacuucgacagcaagaaggccuacagagacguggccuggcugggcgagugcgaccagggcugccuggcccuggccgagcugcugggcuggaagaaggagcuggaggaccuggugagaagagagcacgccagcaucgacgcccagagcggcgccggcgugcccaaccccagcaccagcgccagccccaagaagagccccccccccgccaaggacgaggccagaaccaccgagagagagaagccccaguga

SEQ ID NO: 2966 - RNA, 1401 nt, Artificial Sequence
  AAH02824 variant
auggccgaggagcaggaccugagcgagguggagcugagccccgugggcagcgaggagcccagaugccugagccccggcagcgcccccagccugggccccgacggcggcggcggcggcagcggccugagagccagccccggccccggcgagcugggcaaggugaagaaggagcagcaggacggcgaggccgacgacgacaaguuccccgugugcaucagagaggccgugagccaggugcugagcggcuacgacuggacccuggugcccaugcccgugagagugaacggcgccagcaagagcaagccccacgugaagagacccaugaacgccuucauggugugggcccaggccgccagaagaaagcuggccgaccaguacccccaccugcacaacgccgagcugagcaagacccugggcaagcuguggagacugcugaacgagagcgacaagagacccuucaucgaggaggccgagagacugagaaugcagcacaagaaggaccaccccgacuacaaguaccagcccagaagaagaaagaacggcaaggccgcccagggcgaggccgagugccccggcggcgaggccgagcagggcggcaccgccgccauccaggcccacuacaagagcgcccaccuggaccacagacaccccggcgagggcagccccaugagcgacggcaaccccgagcaccccagcggccagagccacggcccccccaccccccccaccacccccaagaccgagcugcagagcggcaaggccgaccccaagagagacggcagaagcaugggcgagggcggcaagccccacaucgacuucggcaacguggacaucggcgagaucagccacgaggugaugagcaacauggagaccuucgacguggccgagcuggaccaguaccugccccccaacggccaccccggccacgugagcagcuacagcgccgccggcuacggccugggcagcgcccuggccguggccagcggccacagcgccuggaucagcaagccccccggcguggcccugcccaccgugagcccccccggcguggacgccaaggcccaggugaagaccgagaccgccggcccccagggccccccccacuacaccgaccagcccagcaccagccagaucgccuacaccagccugagccugccccacuacggcagcgccuuccccagcaucagcagaccccaguucgacuacagcgaccaccagcccagcggccccuacuacggccacagcggccaggccagcggccuguacagcgccuucagcuacaugggccccagccagagaccccuguacaccgccaucagcgaccccagccccagcggcccccagagccacagccccacccacugggagcagcccguguacaccacccugagcagacccuga

SEQ ID NO: 2967 - RNA, 456 nt, Artificial Sequence
  AAH32457 variant
augagcauccccuucagcaacacccacuacagaaucccccagggcuucggcaaccugcuggagggccugaccagagagauccugagagagcagcccgacaacauccccgccuucgccgccgccuacuucgagagccugcuggagaagagagagaagaccaacuucgaccccgccgaguggggcagcaagguggaggacagauucuacaacaaccacgccuucgaggagcaggagccccccgagaagagcgaccccaagcaggaggagagccagaucagcggcaaggaggaggagaccagcgugaccauccuggacagcagcgaggaggacaaggagaaggaggagguggccgccgugaagauccaggccgccuucagaggccacaucgccagagaggaggccaagaagaugaagaccaacagccugcagaacgaggagaaggaggagaacaaguga

SEQ ID NO: 2968 - RNA, 294 nt, Artificial Sequence
  AAF28420 variant
auggacaagcagagcagcgccggcggcgugaagagaagcgugcccugcgacagcaacgaggccaacgagaugaugcccgagacccccaccggcgacagcgacccccagcccgcccccaagaagaugaagaccagcgagagcagcaccauccugguggugagauacagaagaaacuucaagagaaccagccccgaggagcugcugaacgaccacgccagagagaacagaaucaacccccugcagauggaggaggaggaguucauggagaucaugguggagauccccgccaaguga

SEQ ID NO: 2969 - RNA, 426 nt, Artificial Sequence
  AAH62750 variant
auggagcagcccaccagcagcaccaacggcgagaagaccaagagccccugcgagagcaacaacaagaagaacgacgagaugcaggaggugcccaacagagugcuggcccccgagcagagccugaagaagaccaagaccagcgaguaccccaucaucuucguguacuaccugagaaagggcaagaagaucaacagcaaccagcuggagaacgagcagagccaggagaacagcaucaaccccauccagaaggaggaggacgagggcguggaccugagcgagggcagcagcaacgaggacgaggaccugggccccugcgagggccccagcaaggaggacaaggaccuggacagcagcgagggcagcagccaggaggacgaggaccugggccugagcgagggcagcagccaggacagcggcgaggacuga

SEQ ID NO: 2970 - RNA, 567 nt, Artificial Sequence
  AAH01003 variant
augaacggcgacgacaccuucgccaagagacccagagacgacgccaaggccagcgagaagagaagcaaggccuucgacgacaucgccaccuacuucagcaagaaggaguggaagaagaugaaguacagcgagaagaucagcuacguguacaugaagagaaacuacaaggccaugaccaagcugggcuucaaggugacccugccccccuucaugugcaacaagcaggccaccgacuuccagggcaacgacuucgacaacgaccacaacagaagaauccagguggagcacccccagaugaccuucggcagacugcacagaaucauccccaagaucaugcccaagaagcccgccgaggacgagaacgacagcaagggcgugagcgaggccagcggcccccagaacgacggcaagcagcugcacccccccggcaaggccaacaucagcgagaagaucaacaagagaagcggccccaagagaggcaagcacgccuggacccacagacugagagagagaaagcagcuggugaucuacgaggagaucagcgaccccgaggaggacgacgaguga

SEQ ID NO: 2971 - RNA, 567 nt, Artificial Sequence
  AAH16957 variant
augaacggcgacgacgccuucgccagaagacccaccgugggcgcccagauccccgagaagauccagaaggccuucgacgacaucgccaaguacuucagcaaggaggagugggagaagaugaaggccagcgagaagaucuucuacguguacaugaagagaaaguacgaggccaugaccaagcugggcuucaaggccacccugccccccuucaugugcaacaagagagccgaggacuuccagggcaacgaccuggacaacgaccccaacagaggcaaccagguggagagaccccagaugaccuucggcagacugcagggcaucagccccaagaucaugcccaagaagcccgccgaggagggcaacgacagcgaggaggugcccgaggccagcggcccccagaacgacggcaaggagcugugcccccccggcaagcccaccaccagcgagaagauccacgagagaagcggccccaagagaggcgagcacgccuggacccacagacugagagagagaaagcagcuggugaucuacgaggagaucagcgaccccgaggaggacgacgaguga

SEQ ID NO: 2972 - RNA, 567 nt, Artificial Sequence
  AAC05819 variant
augaacggcgacgacaccuucgccagaagacccaccgugggcgcccagauccccgagaagauccagaaggccuucgacgacaucgccaaguacuucagcaaggaggagugggagaagaugaaggugagcgagaagaucguguacguguacaugaagagaaaguacgaggccaugaccaagcugggcuucaaggccauccugcccagcuucaugagaaacaagagagugaccgacuuccagggcaacgacuucgacaacgaccccaacagaggcaaccaggugcagagaccccagaugaccuucggcagacugcagggcaucuuccccaagaucaugcccaagaagcccgccgaggagggcaacgugagcaaggaggugcccgaggccagcggcccccagaacgacggcaagcagcugugcccccccggcaagcccaccaccagcgagaagaucaacaugaucagcggccccaagagaggcgagcacgccuggacccacagacugagagagagaaagcagcuggugaucuacgaggagaucagcgaccccgaggaggacgacgaguga

SEQ ID NO: 2973 - RNA, 567 nt, Artificial Sequence
  AAC05820 variant
augaacggcgacgacgccuucgccagaagacccagagacgacgcccagaucagcgagaagcugagaaaggccuucgacgacaucgccaaguacuucagcaagaaggagugggagaagaugaagagcagcgagaagaucguguacguguacaugaagcugaacuacgaggugaugaccaagcugggcuucaaggugacccugccccccuucaugagaagcaagagagccgccgacuuccacggcaacgacuucggcaacgacagaaaccacagaaaccagguggagagaccccagaugaccuucggcagccugcagagaaucuuccccaagaucaugcccaagaagcccgccgaggaggagaacggccugaaggaggugcccgaggccagcggcccccagaacgacggcaagcagcugugcccccccggcaaccccagcacccuggagaagaucaacaagaccagcggccccaagagaggcaagcacgccuggacccacagacugagagagagaaagcagcuggugguguacgaggagaucagcgaccccgaggaggacgacgaguga

SEQ ID NO: 2974 - RNA, 888 nt, Artificial Sequence
  CCDS32420.1 variant
auggagcugauccaggacaccagcagacccccccuggaguacgugaagggcgugccccugaucaaguacuucgccgaggcccugggcccccugcagagcuuccaggccagacccgacgaccugcugaucagcaccuaccccaagagcggcaccaccugggugagccagauccuggacaugaucuaccagggcggcgaccuggagaagugccacagagcccccaucuucaugagagugcccuuccuggaguucaaggcccccggcauccccagcggcauggagacccugaaggacacccccgcccccagacugcugaagacccaccugccccuggcccugcugccccagacccugcuggaccagaaggugaaggugguguacguggccagaaacgccaaggacguggccgugagcuacuaccacuucuaccacauggccaaggugcaccccgagcccggcaccugggacagcuuccuggagaaguucauggugggcgaggugagcuacggcagcugguaccagcacgugcaggaguggugggagcugagcagaacccaccccgugcuguaccuguucuacgaggacaugaaggagaaccccaagagagagauccagaagauccuggaguucgugggcagaagccugcccgaggagaccguggacuucguggugcagcacaccagcuucaaggagaugaagaagaaccccaugaccaacuacaccaccgugccccaggaguucauggaccacagcaucagccccuucaugagaaagggcauggccggcgacuggaagaccaccuucaccguggcccagaacgagagauucgacgccgacuacgccgagaagauggccggcugcagccugagcuucagaagcgagcuguga

SEQ ID NO: 2975 - RNA, 3807 nt, Artificial Sequence
  CCDS43990.1 variant
augaucgccgcccccgagauccccaccgacuucaaccugcugcaggagagcgagacccacuucagcagcgacaccgacuucgaggacaucgagggcaagaaccagaagcagggcaagggcaagaccugcaagaagggcaagaagggccccgccgagaagggcaagggcggcaacggcggcggcaagccccccagcggccccaacagaaugaacggccaccaccagcagaacggcguggagaacaugaugcuguucgagguggugaagaugggcaagagcgccaugcagagcgugguggacgacuggaucgagagcuacaagcacgacagagacaucgcccugcuggaccugaucaacuucuucauccagugcagcggcugcaagggcguggugaccgccgagauguucagacacaugcagaacagcgagaucaucagaaagaugaccgaggaguucgacgaggacagcggcgacuacccccugaccauggccggcccccaguggaagaaguucaagagcagcuucugcgaguucaucggcgugcuggugagacagugccaguacagcaucaucuacgacgaguacaugauggacaccgugaucagccugcugaccggccugagcgacagccaggugagagccuucagacacaccagcacccuggccgccaugaagcugaugaccgcccuggugaacguggcccugaaccugagcaucaacauggacaacacccagagacaguacgaggccgagagaaacaagaugaucggcaagagagccaacgagagacuggagcugcugcugcagaagagaaaggagcugcaggagaaccaggacgagaucgagaacaugaugaacgccaucuucaagggcguguucgugcacagauacagagacgccaucgccgagaucagagccaucugcaucgaggagaucggcaucuggaugaagauguacagcgacgccuuccugaacgacagcuaccugaaguacgugggcuggaccaugcacgacaagcagggcgaggugagacugaagugccugaccgcccugcagggccuguacuacaacaaggagcugaacagcaagcuggagcuguucaccagcagauucaaggacagaaucgugagcaugacccuggacaaggaguacgacguggccgugcaggccaucaagcugcugacccuggugcugcagagcagcgaggaggugcugaccgccgaggacugcgagaacguguaccaccugguguacagcgcccacagacccguggccguggccgccggcgaguuccuguacaagaagcuguucagcagaagagaccccgaggaggacggcaugaugaagagaagaggcagacagggccccaacgccaaccuggugaagacccugguguucuucuuccuggagagcgagcugcacgagcacgccgccuaccugguggacagcaugugggacugcgccaccgagcugcugaaggacugggagugcaugaacagccugcugcuggaggagccccugagcggcgaggaggcccugaccgacagacaggagagcgcccugaucgagaucaugcugugcaccaucagacaggccgccgagugccacccccccgugggcagaggcaccggcaagagagugcugaccgccaaggagaagaagacccagcuggacgacagaaccaagaucaccgagcuguucgccguggcccugccccagcugcuggccaaguacagcguggacgccgagaaggugaccaaccugcugcagcugccccaguacuucgaccuggagaucuacaccaccggcagacuggagaagcaccuggacgcccugcugagacagaucagaaacaucguggagaagcacaccgacaccgacgugcuggaggccugcagcaagaccuaccacgcccugugcaacgaggaguucaccaucuucaacagaguggacaucagcagaagccagcugaucgacgagcuggccgacaaguucaacagacugcuggaggacuuccugcaggagggcgaggagcccgacgaggacgacgccuaccaggugcugagcacccugaagagaaucaccgccuuccacaacgcccacgaccugagcaagugggaccuguucgccugcaacuacaagcugcugaagaccggcaucgagaacggcgacaugcccgagcagaucgugauccacgcccugcagugcacccacuacgugauccuguggcagcuggccaagaucaccgagagcagcagcaccaaggaggaccugcugagacugaagaagcagaugagaguguucugccagaucugccagcacuaccugaccaacgugaacaccaccgugaaggagcaggccuucaccauccugugcgacauccugaugaucuucagccaccagaucaugagcggcggcagagacaugcuggagccccugguguacacccccgacagcagccugcagagcgagcugcugagcuucauccuggaccacguguucaucgagcaggacgacgacaacaacagcgccgacggccagcaggaggacgaggccagcaagaucgaggcccugcacaagagaagaaaccugcuggccgccuucugcaagcugaucguguacaccgugguggagaugaacaccgccgccgacaucuucaagcaguacaugaaguacuacaacgacuacggcgacaucaucaaggagaccaugagcaagaccagacagaucgacaagauccagugcgccaagacccugauccugagccugcagcagcuguucaacgagaugauccaggagaacggcuacaacuucgacagaagcagcagcaccuucagcggcaucaaggagcuggccagaagauucgcccugaccuucggccuggaccagcugaagaccagagaggccaucgccaugcugcacaaggacggcaucgaguucgccuucaaggagcccaacccccagggcgagagccaccccccccugaaccuggccuuccuggacauccugagcgaguucagcagcaagcugcugagacaggacaagagaaccguguacguguaccuggagaaguucaugaccuuccagaugagccugagaagagaggacguguggcugccccugaugagcuacagaaacagccugcuggccggcggcgacgacgacaccaugagcgugaucagcggcaucagcagcagaggcagcaccgugagaagcaagaagagcaagcccagcaccggcaagagaaaggugguggagggcaugcagcugagccugaccgaggagagcagcagcagcgacagcauguggcugagcagagagcagacccugcacacccccgugaugaugcagaccccccagcugaccagcaccaucaugagagagcccaagagacugagacccgaggacagcuucaugagcguguaccccaugcagaccgagcaccaccagaccccccuggacuacaacacccaggugaccuggaugcuggcccagagacagcaggaggaggccagacagcagcaggagagagccgccaugagcuacgugaagcugagaaccaaccugcagcacgccaucagaagaggcaccagccugauggaggacgacgaggagcccaucguggaggacgugaugaugagcagcgagggcagaaucgaggaccugaacgagggcauggacuucgacaccauggacaucgaccugccccccagcaagaacagaagagagagaaccgagcugaagcccgacuucuucgaccccgccagcaucauggacgagagcgugcugggcgugagcauguucuga

SEQ ID NO: 2976 - RNA, 1473 nt, Artificial Sequence
  CCDS5615.1 variant
auggagagcaucagcaugaugggcagccccaagagccugagcgagaccuuccugcccaacggcaucaacggcaucaaggacgccagaaaggugaccgugggcgugaucggcagcggcgacuucgccaagagccugaccaucagacugaucagaugcggcuaccacguggugaucggcagcagaaaccccaaguucgccagcgaguucuucccccacgugguggacgugacccaccacgaggacgcccugaccaagaccaacaucaucuucguggccauccacagagagcacuacaccagccugugggaccugagacaccugcuggugggcaagauccugaucgacgugagcaacaacaugagaaucaaccaguaccccgagagcaacgccgaguaccuggccagccuguuccccgacagccugaucgugaagggcuucaacguggugagcgccugggcccugcagcugggccccaaggacgccagcagacagguguacaucugcagcaacaacauccaggccagacagcaggugaucgagcuggccagacagcugaacuucauccccaucgaccugggcagccugagcagcgccagagagaucgagaaccugccccugagacuguucacccuguggagaggccccguggugguggccaucagccuggccaccuucuucuuccuguacagcuucgugagagacgugauccaccccuacgccagaaaccagcagagcgacuucuacaagauccccaucgagaucgugaacaagacccugcccaucguggccaucacccugcugagccugguguaccuggccggccugcuggccgccgccuaccagcuguacuacggcaccaaguacagaagauucccccccuggcuggagaccuggcugcagugcagaaagcagcugggccugcugagcuucuucuucgccauggugcacguggccuacagccugugccugcccaugagaagaagcgagagauaccuguuccugaacauggccuaccagcaggugcacgccaacaucgagaacagcuggaacgaggaggagguguggagaaucgagauguacaucagcuucggcaucaugagccugggccugcugagccugcuggccgugaccagcauccccagcgugagcaacgcccugaacuggagagaguucagcuucauccagagcacccugggcuacguggcccugcugaucagcaccuuccacgugcugaucuacggcuggaagagagccuucgaggaggaguacuacagauucuacaccccccccaacuucgugcuggcccuggugcugcccagcaucgugauccugggcaagaucauccuguuccugcccugcaucagcagaaagcugaagagaaucaagaagggcugggagaagagccaguuccuggaggagggcaugggcggcaccaucccccacgugagccccgagagagugaccgugauguga

SEQ ID NO: 2977 - RNA, 777 nt, Artificial Sequence
  EAW93749 variant
auggagagcagaaaggacaucaccaaccaggaggagaucuggaagaugaagcccagaagaaaccuggaggacaacgacuaccugcacaaggacaccggcgagaccagcaugcugaagagacccgugcugcugcaccugcagcagaccgcccacgccgacgaguucgacugccccagcgagcugcagcacgcccaggagcuguucccccaguggcaccugcccaucaagaucgccgccgugauggccagccugaccuuccuguacacccugcugagagaggugauccacccccuggccaccagccaccagcaguacuucuacaagauccccauccuggugaucaacaaggugcugcccauggugagcaucacccugcuggcccugguguaccugcccggcgugaucgccgccaucgugcaggugcacaacggcaccaaguacaagaaguucccccacuggcuggacaaguggaugcugaccagaaagcaguucggccugcugagccuguucuucgccgugcugcacgccaucuacacccugagcuacgccaugagaagaagcuacagauacaagcugcugaacugggccuaccagcaggugcagcagaacaaggaggacgccuggaucgagcacgacguguggagaauggagaucuacgugagccugggcaucgugggccuggccauccuggcccugcuggccgugaccagcauccccagcgugagcgacagccugaccuggagagaguuccacuacauccaggugaacaacaucuga

SEQ ID NO: 2978 - RNA, 1020 nt, Artificial Sequence
  AAD15620 variant
auggagagcagaaaggacaucaccaaccaggaggagcuguggaagaugaagcccagaagaaaccuggaggaggacgacuaccugcacaaggacaccggcgagaccagcaugcugaagagacccgugcugcugcaccugcaccagaccgcccacgccgacgaguucgacugccccagcgagcugcagcacacccaggagcuguucccccaguggcaccugcccaucaagaucgccgccaucaucgccagccugaccuuccuguacacccugcugagagaggugauccacccccuggccaccagccaccagcaguacuucuacaagauccccauccuggugaucaacaaggugcugcccauggugagcaucacccugcuggcccugguguaccugcccggcgugaucgccgccaucgugcagcugcacaacggcaccaaguacaagaaguucccccacuggcuggacaaguggaugcugaccagaaagcaguucggccugcugagcuucuucuucgccgugcugcacgccaucuacagccugagcuaccccaugagaagaagcuacagauacaagcugcugaacugggccuaccagcaggugcagcagaacaaggaggacgccuggaucgagcacgacguguggagaauggagaucuacgugagccugggcaucgugggccuggccauccuggcccugcuggccgugaccagcauccccagcgugagcgacagccugaccuggagagaguuccacuacauccagagcaagcugggcaucgugagccugcugcugggcaccauccacgcccugaucuucgccuggaacaaguggaucgacaucaagcaguucgugugguacaccccccccaccuucaugaucgccguguuccugcccaucguggugcugaucuucaagagcauccuguuccugcccugccugagaaagaagauccugaagaucagacacggcugggaggacgugaccaagaucaacaagaccgagaucugcagccagcuguga

SEQ ID NO: 2979 - RNA, 498 nt, Artificial Sequence
  CCDS32752.1 variant
augggcgcccccacccugccccccgccuggcagcccuuccugaaggaccacagaaucagcaccuucaagaacuggcccuuccuggagggcugcgccugcacccccgagagaauggccgaggccggcuucauccacugccccaccgagaacgagcccgaccuggcccagugcuucuucugcuucaaggagcuggagggcugggagcccgacgacgaccccaucggccccggcaccguggccuacgccugcaacaccagcacccugggcggcagaggcggcagaaucaccagagaggagcacaagaagcacagcagcggcugcgccuuccugagcgugaagaagcaguucgaggagcugacccugggcgaguuccugaagcuggacagagagagagccaagaacaagaucgccaaggagaccaacaacaagaagaaggaguucgaggagaccgccgagaaggugagaagagccaucgagcagcuggccgccauggacuga

SEQ ID NO: 2980 - RNA, 429 nt, Artificial Sequence
  AAC51660 variant
augggcgcccccacccugccccccgccuggcagcccuuccugaaggaccacagaaucagcaccuucaagaacuggcccuuccuggagggcugcgccugcacccccgagagaauggccgaggccggcuucauccacugccccaccgagaacgagcccgaccuggcccagugcuucuucugcuucaaggagcuggagggcugggagcccgacgacgaccccaucgaggagcacaagaagcacagcagcggcugcgccuuccugagcgugaagaagcaguucgaggagcugacccugggcgaguuccugaagcuggacagagagagagccaagaacaagaucgccaaggagaccaacaacaagaagaaggaguucgaggagaccgccaagaaggugagaagagccaucgagcagcuggccgccauggacuga

SEQ ID NO: 2981 - RNA, 2931 nt, Artificial Sequence
  EAW56623 variant
auggagaagcagaagcccuucgcccuguucgugccccccagaagcagcagcagccaggugagcgccgugaagccccagacccugggcggcgacagcaccuucuucaagagcuucaacaagugcaccgaggacgacuucgaguuccccuucgccaagaccaaccugagcaagaacggcgagaacaucgacagcgaccccgcccugcagaaggugaacuuccugcccgugcuggagcaggugggcaacagcgacugccacuaccaggagggccugaaggacagcgaccuggagaacagcgagggccugagcagaguguacagcaagcuguacaaggaggccgagaagaucaagaaguggaaggugagcaccgaggccgagcugagacagaaggagagcaagcugcaggagaacagaaagaucaucgaggcccagagaaaggccauccaggagcugcaguucggcaacgagaaggugagccugaagcuggaggagggcauccaggagaacaaggaccugaucaaggagaacaacgccaccagacaccugugcaaccugcugaaggagaccugcgccagaagcgccgagaagaccaagaaguacgaguacgagagagaggagaccagacagguguacauggaccugaacaacaacaucgagaagaugaucaccgccuucgaggagcugagagugcaggccgagaacagcagacuggagaugcacuucaagcugaaggaggacuacgagaagauccagcaccuggagcaggaguacaagaaggagaucaacgacaaggagaagcaggugagccugcugcugauccagaucaccgagaaggagaacaagaugaaggaccugaccuuccugcuggaggagagcagagacaaggugaaccagcuggaggagaagaccaagcugcagagcgagaaccugaagcagagcaucgagaagcagcaccaccugaccaaggagcuggaggacaucaaggugagccugcagagaagcgugagcacccagaaggcccuggaggaggaccugcagaucgccaccaagaccaucugccagcugaccgaggagaaggagacccagauggaggagagcaacaaggccagagccgcccacagcuucguggugaccgaguucgagaccaccgugugcagccuggaggagcugcugagaaccgagcagcagagacuggagaagaacgaggaccagcugaagauccugaccauggagcugcagaagaagagcagcgagcuggaggagaugaccaagcugaccaacaacaaggagguggagcuggaggagcugaagaaggugcugggcgagaaggagacccugcuguacgagaacaagcaguucgagaagaucgccgaggagcugaagggcaccgagcaggagcugaucggccugcugcaggccagagagaaggaggugcacgaccuggagauccagcugaccgccaucaccaccagcgagcaguacuacagcaaggaggugaaggaccugaagaccgagcuggagaacgagaagcugaagaacaccgagcugaccagccacugcaacaagcugagccuggagaacaaggagcugacccaggagaccagcgacaugacccuggagcugaagaaccagcaggaggacaucaacaacaacaagaagcaggaggagagaaugcugaagcagaucgagaaccugcaggagaccgagacccagcugagaaacgagcuggaguacgugagagaggagcugaagcagaagagagacgaggugaagugcaagcuggacaagagcgaggagaacugcaacaaccugagaaagcagguggagaacaagaacaaguacaucgaggagcugcagcaggagaacaaggcccugaagaagaagggcaccgccgagagcaagcagcugaacguguacgagaucaaggugaacaagcuggagcuggagcuggagagcgccaagcagaaguucggcgagaucaccgacaccuaccagaaggagaucgaggacaagaagaucagcgaggagaaccugcuggaggagguggagaaggccaaggugaucgccgacgaggccgugaagcugcagaaggagaucgacaagagaugccagcacaagaucgccgagaugguggcccugauggagaagcacaagcaccaguacgacaagaucaucgaggagagagacagcgagcugggccuguacaagagcaaggagcaggagcagagcagccugagagccagccuggagaucgagcugagcaaccugaaggccgagcugcugagcgugaagaagcagcuggagaucgagagagaggagaaggagaagcugaagagagaggccaaggagaacaccgccacccugaaggagaagaaggacaagaagacccagaccuuccugcuggagacccccgagaucuacuggaagcuggacagcaaggccgugcccagccagaccgugagcagaaacuucaccagcguggaccacggcaucagcaaggacaagagagacuaccuguggaccagcgccaagaacacccugagcaccccccugcccaaggccuacaccgugaagacccccaccaagcccaagcugcagcagagagagaaccugaacauccccaucgaggagagcaagaagaagagaaagauggccuucgaguucgacaucaacagcgacagcagcgagaccaccgaccugcugagcauggugagcgaggaggagacccugaagacccuguacagaaacaacaacccccccgccagccaccugugcgugaagacccccaagaaggcccccagcagccugaccacccccggcagcacccugaaguucggcgccaucagaaagaugagagaggacagaugggccgugaucgccaagauggacagaaagaagaagcugaaggaggccgagaagcuguucguguga

SEQ ID NO: 2982 - RNA, 2931 nt, Artificial Sequence
  AAI44020 variant
auggagaagcagaagcccuucgcccuguucgugccccccagaagcagcagcagccaggugagcgccgugaagccccagacccugggcggcgacagcaccuucuucaagagcuucaacaagugcaccgaggacgacuucgaguuccccuucgccaagaccaaccugagcaagaacggcgagaacaucgacagcgaccccgcccugcagaaggugaacuuccugcccguguucgagcaggugggcaacagcgacugccacuaccaggagggccugaaggacagcgaccuggagaacagcgagggccugagcagaguguacagcaagcuguacaaggaggccgagaagaucaagaaguggaaggugagcaccgaggccgagcugagacagaaggagagcaagcugcaggagaacagaaagaucaucgaggcccagagaaaggccauccaggagcugcaguucggcaacgagaaggugagccugaagcuggaggagggcauccaggagaacaaggaccugaucaaggagaacaacgccaccagacaccugugcaaccugcugaaggagaccugcgccagaagcgccgagaagaccaagaaguacgaguacgagagagaggagaccagacagguguacauggaccugaacagcaacaucgagaagaugaucaccgccuucgaggagcugagagugcaggccgagaacagcagacuggagaugcacuucaagcugaaggaggacuacgagaagauccagcaccuggagcaggaguacaagaaggagaucaacgacaaggagaagcaggugagccugcugcugauccagaucaccgagaaggagaacaagaugaaggaccugaccuuccugcuggaggagagcagagacaaggugaaccagcuggaggagaagaccaagcugcagagcgagaaccugaagcagagcaucgagaagcagcaccaccugaccaaggagcuggaggacaucaaggugagccugcagagaagcgugagcacccagaaggcccuggaggaggaccugcagaucgccaccaagaccaucugccagcugaccgaggagaaggagacccagauggaggagagcaacaaggccagagccgcccacagcuucguggugaccgaguucgagaccaccgugugcagccuggaggagcugcugagaaccgagcagcagagacuggagaagaacgaggaccagcugaagauccugaccauggagcugcagaagaagagcagcgagcuggaggagaugaccaagcugaccaacaacaaggagguggagcuggaggagcugaagaaggugcugggcgagaaggagacccugcuguacgagaacaagcaguucgagaagaucgccgaggagcugaagggcaccgagcaggagcugaucggccugcugcaggccagagagaaggaggugcacgaccuggagauccagcugaccgccaucaccaccagcgagcaguacuacagcaaggaggugaaggaccugaagaccgagcuggagaacgagaagcugaagaacaccgagcugaccagccacugcaacaagcugagccuggagaacaaggagcugacccaggagaccagcgacaugacccuggagcugaagaaccagcaggaggacaucaacaacaacaagaagcaggaggagagaaugcugaagcagaucgagaaccugcaggagaccgagacccagcugagaaacgagcuggaguacgugagagaggagcugaagcagaagagagacgaggugaagugcaagcuggacaagagcgaggagaacugcaacaaccugagaaagcagguggagaacaagaacaaguacaucgaggagcugcagcaggagaacaaggcccugaagaagaagggcaccgccgagagcaagcagcugaacguguacgagaucaaggugaacaagcuggagcuggagcuggagagcgccaagcagaaguucggcgagaucaccgacaccuaccagaaggagaucgaggacaagaagaucagcgaggagaaccugcuggaggagguggagaaggccaaggugaucgccgacgaggccgugaagcugcagaaggagaucgacaagagaugccagcacaagaucgccgagaugguggcccugauggagaagcacaagcaccaguacgacaagaucaucgaggagagagacagcgagcugggccuguacaagagcaaggagcaggagcagagcagccugagagccagccuggagaucgagcugagcaaccugaaggccgagcugcugagcgugaagaagcagcuggagaucgagagagaggagaaggagaagcugaagagagaggccaaggagaacaccgccacccugaaggagaagaaggacaagaagacccagaccuuccugcuggagacccccgagaucuacuggaagcuggacagcaaggccgugcccagccagaccgugagcagaaacuucaccagcguggaccacggcaucagcaaggacaagagagacuaccuguggaccagcgccaagaacacccugagcaccccccugcccaaggccuacaccgugaagacccccaccaagcccaagcugcagcagagagagaaccugaacauccccaucgaggagagcaagaagaagagaaagauggccuucgaguucgacaucaacagcgacagcagcgagaccaccgaccugcugagcauggugagcgaggaggagacccugaagacccuguacagaaacaacaacccccccgccagccaccugugcgugaagacccccaagaaggcccccagcagccugaccacccccggcagcacccugaaguucggcgccaucagaaagaugagagaggacagaugggccgugaucgccaagauggacagaaagaagaagcugaaggaggccgagaagcuguucguguga

SEQ ID NO: 2983 - RNA, 2931 nt, Artificial Sequence; identical to SEQ ID NO: 2981
  AAI26267 variant

SEQ ID NO: 2984 - RNA, 330 nt, Artificial Sequence
  AAI05300 variant
auggagaagcagaagcccuucgcccuguucgugccccccagaagcagcagcagccaggugagcgccgugaagccccagacccugggcggcgacagcaccuucuucaagagcuucaacaagugcaccgaggacgacuucgaguuccccuucgccaagaccaaccugagcaagaacggcgagaacaucgacagcgaccccgcccugcagaacgugaacuuccugcccgugcuggagcaggugggcaacagcgacugccacuaccaggagggccugaaggacagcgaccuggagaacagcgagggccugagcagaguguacagcaagcuguga

SEQ ID NO: 2985 - RNA, 1467 nt, Artificial Sequence
  BAF56181 variant
augagcguggccuucgccgcccccagacagagaggcaagggcgagaucacccccgccgccauccagaagaugcuggacgacaacaaccaccugauccagugcaucauggacagccagaacaagggcaagaccagcgagugcagccaguaccagcagaugcugcacaccaaccugguguaccuggccaccaucgccgacagcaaccagaacaugcagagccugcugcccgccccccccacccagaacaugcccaugggccccggcggcaugaaccagagcggccccccccccccccccagaagccacaacaugcccagcgacggcauggugggcggcggcccccccgccccccacaugcagaaccagaugaacggccagaugcccggccccaaccacaugcccaugcagggccccggccccaaccagcugaacaugaccaacagcagcaugaacaugcccagcagcagccacggcagcaugggcggcuacaaccacagcgugcccagcagccagagcaugcccgugcagaaccagaugaccaugagccagggccagcccaugggcaacuacggccccagacccaacaugagcaugcagcccaaccagggccccaugaugcaccagcagccccccagccagcaguacaacaugccccagggcggcggccagcacuaccagggccagcagccccccaugggcaugaugggccaggugaaccagggcaaccacaugaugggccagagacagaucccccccuacagacccccccagcagggccccccccagcaguacagcggccaggaggacuacuacggcgaccaguacagccacggcggccagggcccccccgagggcaugaaccagcaguacuaccccgacggccacaacgacuacggcuaccagcagcccagcuaccccgagcagggcuacgacagacccuacgaggacagcagccagcacuacuacgagggcggcaacagccaguacggccagcagcaggacgccuaccagggcccccccccccagcagggcuaccccccccagcagcagcaguaccccggccagcagggcuaccccggccagcagcagggcuacggccccagccagggcggccccggcccccaguaccccaacuacccccagggccagggccagcaguacggcggcuacagacccacccagcccggccccccccagcccccccagcagagacccuacggcuacgaccagaucaugcccaagaagcccgccgaggacgagaacgacagcaagggcgugagcgaggccagcggcccccagaacgacggcaagcagcugcacccccccggcaaggccaacaucagcgagaagaucaacaagagaagcggccccaagagaggcaagcacgccuggacccacagacugagagagagaaagcagcuggugaucuacgaggagaucagcgaccccgaggaggacgacgaguga

SEQ ID NO: 2986 - RNA, 1374 nt, Artificial Sequence
  BAF56182 variant
augagcguggccuucgccgcccccagacagagaggcaagggcgagaucacccccgccgccauccagaagaugcuggacgacaacaaccaccugauccagugcaucauggacagccagaacaagggcaagaccagcgagugcagccaguaccagcagaugcugcacaccaaccugguguaccuggccaccaucgccgacagcaaccagaacaugcagagccugcugcccgccccccccacccagaacaugcccaugggccccggcggcaugaaccagagcggccccccccccccccccagaagccacaacaugcccagcgacggcauggugggcggcggcccccccgccccccacaugcagaaccagaugaacggccagaugcccggccccaaccacaugcccaugcagggccccggccccaaccagcugaacaugaccaacagcagcaugaacaugcccagcagcagccacggcagcaugggcggcuacaaccacagcgugcccagcagccagagcaugcccgugcagaaccagaugaccaugagccagggccagcccaugggcaacuacggccccagacccaacaugagcaugcagcccaaccagggccccaugaugcaccagcagccccccagccagcaguacaacaugccccagggcggcggccagcacuaccagggccagcagccccccaugggcaugaugggccaggugaaccagggcaaccacaugaugggccagagacagaucccccccuacagacccccccagcagggccccccccagcaguacagcggccaggaggacuacuacggcgaccaguacagccacggcggccagggcccccccgagggcaugaaccagcaguacuaccccgacggcaacagccaguacggccagcagcaggacgccuaccagggcccccccccccagcagggcuaccccccccagcagcagcaguaccccggccagcagggcuaccccggccagcagcagggcuacggccccagccagggcggccccggcccccaguaccccaacuacccccagggccagggccagcaguacggcggcuacagacccacccagcccggccccccccagcccccccagcagagacccuacggcuacgaccagaucaugcccaagaagcccgccgaggacgagaacgacagcaagggcgugagcgaggccagcggcccccagaacgacggcaagcagcugcacccccccggcaaggccaacaucagcgagaagaucaacaagagaagcggccccaagagaggcaagcacgccuggacccacagacugagagagagaaagcagcuggugaucuacgaggagaucagcgaccccgaggaggacgacgaguga

SEQ ID NO: 2987 - RNA, 1467 nt, Artificial Sequence
  BAF56183 variant
augagcguggccuucgccgcccccagacagagaggcaagggcgagaucacccccgccgccauccagaagaugcuggacgacaacaaccaccugauccagugcaucauggacagccagaacaagggcaagaccagcgagugcagccaguaccagcagaugcugcacaccaaccugguguaccuggccaccaucgccgacagcaaccagaacaugcagagccugcugcccgccccccccacccagaacaugcccaugggccccggcggcaugaaccagagcggccccccccccccccccagaagccacaacaugcccagcgacggcauggugggcggcggcccccccgccccccacaugcagaaccagaugaacggccagaugcccggccccaaccacaugcccaugcagggccccggccccaaccagcugaacaugaccaacagcagcaugaacaugcccagcagcagccacggcagcaugggcggcuacaaccacagcgugcccagcagccagagcaugcccgugcagaaccagaugaccaugagccagggccagcccaugggcaacuacggccccagacccaacaugagcaugcagcccaaccagggccccaugaugcaccagcagccccccagccagcaguacaacaugccccagggcggcggccagcacuaccagggccagcagccccccaugggcaugaugggccaggugaaccagggcaaccacaugaugggccagagacagaucccccccuacagacccccccagcagggccccccccagcaguacagcggccaggaggacuacuacggcgaccaguacagccacggcggccagggcccccccgagggcaugaaccagcaguacuaccccgacggccacaacgacuacggcuaccagcagcccagcuaccccgagcagggcuacgacagacccuacgaggacagcagccagcacuacuacgagggcggcaacagccaguacggccagcagcaggacgccuaccagggcccccccccccagcagggcuaccccccccagcagcagcaguaccccggccagcagggcuaccccggccagcagcagggcuacggccccagccagggcggccccggcccccaguaccccaacuacccccagggccagggccagcaguacggcggcuacagacccacccagcccggccccccccagcccccccagcagagacccuacggcuacgaccagaucaugcccaagaagcccgccgaggagggcaacgacagcgaggaggugcccgaggccagcggcccccagaacgacggcaaggagcugugcccccccggcaagcccaccaccagcgagaagauccacgagagaagcggccccaagagaggcgagcacgccuggacccacagacugagagagagaaagcagcuggugaucuacgaggagaucagcgaccccgaggaggacgacgaguga

SEQ ID NO: 2988 - RNA, 1374 nt, Artificial Sequence
  BAF56184 variant
augagcguggccuucgccgcccccagacagagaggcaagggcgagaucacccccgccgccauccagaagaugcuggacgacaacaaccaccugauccagugcaucauggacagccagaacaagggcaagaccagcgagugcagccaguaccagcagaugcugcacaccaaccugguguaccuggccaccaucgccgacagcaaccagaacaugcagagccugcugcccgccccccccacccagaacaugcccaugggccccggcggcaugaaccagagcggccccccccccccccccagaagccacaacaugcccagcgacggcauggugggcggcggcccccccgccccccacaugcagaaccagaugaacggccagaugcccggccccaaccacaugcccaugcagggccccggccccaaccagcugaacaugaccaacagcagcaugaacaugcccagcagcagccacggcagcaugggcggcuacaaccacagcgugcccagcagccagagcaugcccgugcagaaccagaugaccaugagccagggccagcccaugggcaacuacggccccagacccaacaugagcaugcagcccaaccagggccccaugaugcaccagcagccccccagccagcaguacaacaugccccagggcggcggccagcacuaccagggccagcagccccccaugggcaugaugggccaggugaaccagggcaaccacaugaugggccagagacagaucccccccuacagacccccccagcagggccccccccagcaguacagcggccaggaggacuacuacggcgaccaguacagccacggcggccagggcccccccgagggcaugaaccagcaguacuaccccgacggcaacagccaguacggccagcagcaggacgccuaccagggcccccccccccagcagggcuaccccccccagcagcagcaguaccccggccagcagggcuaccccggccagcagcagggcuacggccccagccagggcggccccggcccccaguaccccaacuacccccagggccagggccagcaguacggcggcuacagacccacccagcccggccccccccagcccccccagcagagacccuacggcuacgaccagaucaugcccaagaagcccgccgaggagggcaacgacagcgaggaggugcccgaggccagcggcccccagaacgacggcaaggagcugugcccccccggcaagcccaccaccagcgagaagauccacgagagaagcggccccaagagaggcgagcacgccuggacccacagacugagagagagaaagcagcuggugaucuacgaggagaucagcgaccccgaggaggacgacgaguga

SEQ ID NO: 2989 - RNA, 336 nt, Artificial Sequence
  AAI05590 variant
augaagaccaacgacaccuacaugaaguucagcuggcugaccgugcccgagaagagccuggacaaggagcacagaugcaucgugagacacgagaacaacaagaacggcguggaccaggagaucaucuucccccccaucaagaccgacgugaucaccauggaccccaaggacaacugcagcaaggacgccaacgacacccugcugcugcagcugaccaacaccagcgccuacuacauguaccugcugcugcugcugaagagcgugguguacuucgccaucaucaccugcugccugcugagaagaaccgccuucugcugcaacggcgagaagagcuga

SEQ ID NO: 2990 - RNA, 177 nt, Artificial Sequence
  AAG29337 variant
augcagauguucccccccagcccccuguucuucuuccugcagcugcugaagcagagcagcagaagacuggagcacaccuucguguuccugagaaacuucagccugaugcugcugagauacaucggcaagaagagaagagccaccagauucugggaccccagaagaggcacccccuga

SEQ ID NO: 2991 - RNA, 1131 nt, Artificial Sequence
  AAF26776 variant
auggccaacagcgccaacaccaacaccgugcccaagcuguacagaagcgugaucgaggacgugaucaacgacgugagagacaucuuccuggacgacggcguggacgagcaggugcugauggagcugaagacccugugggagaacaagcugaugcagagcagagccguggacggcuuccacagcgaggagcagcagcugcugcugcaggugcagcagcagcaccagccccagcagcagcagcaccaccaccaccaccaccaccagcaggcccagccccagcagaccgugccccagcaggcccagacccagcaggugcugauccccgccagccagcaggccaccgccccccaggugaucgugcccgacagcaagcugauccagcacaugaacgccagcaacaugagcgccgccgccaccgccgccacccuggcccugcccgccggcgugacccccgugcagcagauccugaccaacagcggccagcugcugcagguggugagagccgccaacggcgcccaguacaucuuccagccccagcagagcguggugcugcagcagcaggugaucccccagaugcagcccggcggcgugcaggcccccgugauccagcaggugcuggccccccugcccggcggcaucagcccccagaccggcgugaucauccagccccagcagauccuguucaccggcaacaagacccaggugauccccaccaccguggccgcccccacccccgcccaggcccagaucaccgccaccggccagcagcagccccaggcccagcccgcccagacccaggccccccuggugcugcagguggacggcaccggcgacaccagcagcgaggaggacgaggacgaggaggaggacuacgacgacgacgaggaggaggacaaggagaaggacggcgccgaggacggccagguggaggaggagccccugaacagcgaggacgacgugagcgacgaggagggccaggagcuguucgacaccgagaacgugguggugugccaguacgacaagauccacagaagcaagaacaaguggaaguuccaccugaaggacggcaucaugaaccugaacggcagagacuacaucuucagcaaggccaucggcgacgccgagugguga

SEQ ID NO: 2992 - RNA, 1173 nt, Artificial Sequence
  AAH00125 variant
augccccccagcggccugagacugcugcugcugcugcugccccugcuguggcugcuggugcugacccccggcagacccgccgccggccugagcaccugcaagaccaucgacauggagcuggugaagagaaagagaaucgaggccaucagaggccagauccugagcaagcugagacuggccagcccccccagccagggcgaggugccccccggcccccugcccgaggccgugcuggcccuguacaacagcaccagagacagaguggccggcgagagcgccgagcccgagcccgagcccgaggccgacuacuacgccaaggaggugaccagagugcugaugguggagacccacaacgagaucuacgacaaguucaagcagagcacccacagcaucuacauguucuucaacaccagcgagcugagagaggccgugcccgagcccgugcugcugagcagagccgagcugagacugcugagacugaagcugaagguggagcagcacguggagcuguaccagaaguacagcaacaacagcuggagauaccugagcaacagacugcuggcccccagcgacagccccgaguggcugagcuucgacgugaccggcguggugagacaguggcugagcagaggcggcgagaucgagggcuucagacugagcgcccacugcagcugcgacagcagagacaacacccugcagguggacaucaacggcuucaccaccggcagaagaggcgaccuggccaccauccacggcaugaacagacccuuccugcugcugauggccaccccccuggagagagcccagcaccugcagagcagcagacacagaagagcccuggacaccaacuacugcuucagcagcaccgagaagaacugcugcgugagacagcuguacaucgacuucagaaaggaccugggcuggaaguggauccacgagcccaagggcuaccacgccaacuucugccugggccccugccccuacaucuggagccuggacacccaguacagcaaggugcuggcccuguacaaccagcacaaccccggcgccagcgccgcccccugcugcgugccccaggcccuggagccccugcccaucguguacuacgugggcagaaagcccaagguggagcagcugagcaacaugaucgugagaagcugcaagugcagcuga

SEQ ID NO: 2993 - RNA, 1704 nt, Artificial Sequence
  AAT70724 variant
augggcagaggccugcugagaggccuguggccccugcacaucgugcuguggaccagaaucgccagcaccauccccccccacgugcagaagagcgugaacaacgacaugaucgugaccgacaacaacggcgccgugaaguucccccagcugugcaaguucugcgacgugagauucagcaccugcgacaaccagaagagcugcaugagcaacugcagcaucaccagcaucugcgagaagccccaggaggugugcguggccguguggagaaagaacgacgagaacaucacccuggagaccgugugccacgaccccaagcugcccuaccacgacuucauccuggaggacgccgccagccccaagugcaucaugaaggagaagaagaagcccggcgagaccuucuucaugugcagcugcagcagcgacgagugcaacgacaacaucaucuucagcgaggaguacaacaccagcaaccccgaccugcugcuggugaucuuccaggugaccggcaucagccugcugcccccccugggcguggccaucagcgugaucaucaucuucuacugcuacagagugaacagacagcagaagcugagcagcaccugggagaccggcaagaccagaaagcugauggaguucagcgagcacugcgccaucauccuggaggacgacagaagcgacaucagcagcaccugcgccaacaacaucaaccacaacaccgagcugcugcccaucgagcuggacacccuggugggcaagggcagauucgccgagguguacaaggccaagcugaagcagaacaccagcgagcaguucgagaccguggccgugaagaucuuccccuacgaggaguacgccagcuggaagaccgagaaggacaucuucagcgacaucaaccugaagcacgagaacauccugcaguuccugaccgccgaggagagaaagaccgagcugggcaagcaguacuggcugaucaccgccuuccacgccaagggcaaccugcaggaguaccugaccagacacgugaucagcugggaggaccugagaaagcugggcagcagccuggccagaggcaucgcccaccugcacagcgaccacacccccugcggcagacccaagaugcccaucgugcacagagaccugaagagcagcaacauccuggugaagaacgaccugaccugcugccugugcgacuucggccugagccugagacuggaccccacccugagcguggacgaccuggccaacagcggccaggugggcaccgccagauacauggcccccgaggugcuggagagcagaaugaaccuggagaacguggagagcuucaagcagaccgacguguacagcauggcccuggugcugugggagaugaccagcagaugcaacgccgugggcgaggugaaggacuacgagccccccuucggcagcaaggugagagagcaccccugcguggagagcaugaaggacaacgugcugagagacagaggcagacccgagauccccagcuucuggcugaaccaccagggcauccagauggugugcgagacccugaccgagugcugggaccacgaccccgaggccagacugaccgcccagugcguggccgagagauucagcgagcuggagcaccuggacagacugagcggcagaagcugcagcgaggagaagauccccgaggacggcagccugaacaccaccaaguga

SEQ ID NO: 2994 - RNA, 2055 nt, Artificial Sequence
  BAG35778 variant
augauggacgccagcaaggagcugcaggugcugcacaucgacuuccugaaccaggacaacgccgugagccaccacaccugggaguuccagaccagcagccccguguucagaagaggccagguguuccaccugagacuggugcugaaccagcccccccagagcuaccaccagcugaagcuggaguucagcaccggccccaaccccagcaucgccaagcacacccugguggugcuggaccccagaacccccagcgaccacuacaacuggcaggccacccugcagaacgagagcggcaaggaggugaccguggccgugaccagcagccccaacgccauccugggcaaguaccagcugaacgugaagaccggcaaccacauccugaagagcgaggagaacauccuguaccugcuguucaaccccuggugcaaggaggacaugguguucaugcccgacgaggacgagagaaaggaguacauccugaacgacaccggcugccacuacgugggcgccgccagaagcaucaagugcaagcccuggaacuucggccaguucgagaagaacgugcuggacugcugcaucagccugcugaccgagagcagccugaagcccaccgacagaagagaccccgugcuggugugcagagccaugugcgccaugaugagcuucgagaagggccagggcgugcugaucggcaacuggaccggcgacuacgagggcggcaccgcccccuacaaguggaccggcagcgcccccauccugcagcaguacuacaacaccaagcaggccgugugcuucggccagugcuggguguucgccggcauccugaccaccgugcugagagcccugggcauccccgccagaagcgugaccggcuucgacagcgcccacgacaccgagagaaaccugaccguggacaccuacgugaacgagaacggcgagaagaucaccagcaugacccacgacagcguguggaacuuccacguguggaccgacgccuggaugaagagacccgaccugcccaagggcuacgacggcuggcaggccguggacgccaccccccaggagagaagccagggcguguucugcugcggccccagcccccugaccgccaucagaaagggcgacaucuucaucguguacgacaccagauucguguucagcgaggugaacggcgacagacugaucuggcuggugaagauggugaacggccaggaggagcugcacgugaucagcauggagaccaccagcaucggcaagaacaucagcaccaaggccgugggccaggacagaagaagagacaucaccuacgaguacaaguaccccgagggcagcagcgaggagagacaggugauggaccacgccuuccugcugcugagcagcgagagagagcacagaagacccgugaaggagaacuuccugcacaugagcgugcagagcgacgacgugcugcugggcaacagcgugaacuucaccgugauccugaagagaaagaccgccgcccugcagaacgugaacauccugggcagcuucgagcugcagcuguacaccggcaagaagauggccaagcugugcgaccugaacaagaccagccagauccagggccaggugagcgaggugacccugacccuggacagcaagaccuacaucaacagccuggccauccuggacgacgagcccgugaucagaggcuucaucaucgccgagaucguggagagcaaggagaucauggccagcgagguguucaccagcuuccaguaccccgaguucagcaucgagcugcccaacaccggcagaaucggccagcugcuggugugcaacugcaucuucaagaacacccuggccaucccccugaccgacgugaaguucagccuggagagccugggcaucagcagccugcagaccagcgaccacggcaccgugcagcccggcgagaccauccagagccagaucaagugcacccccaucaagaccggccccaagaaguucaucgugaagcugagcagcaagcaggugaaggagaucaacgcccagaagaucgugcugaucaccaaguga

SEQ ID NO: 2995 - RNA, 3375 nt, Artificial Sequence
  CCDS6519.1 variant
auggacagccuggccagccuggugcugugcggcgugagccugcugcugagcggcaccguggagggcgccauggaccugauccugaucaacagccugccccuggugagcgacgccgagaccagccugaccugcaucgccagcggcuggagaccccacgagcccaucaccaucggcagagacuucgaggcccugaugaaccagcaccaggacccccuggaggugacccaggacgugaccagagagugggccaagaaggugguguggaagagagagaaggccagcaagaucaacggcgccuacuucugcgagggcagagugagaggcgaggccaucagaaucagaaccaugaagaugagacagcaggccagcuuccugcccgccacccugaccaugaccguggacaagggcgacaacgugaacaucagcuucaagaaggugcugaucaaggaggaggacgccgugaucuacaagaacggcagcuucauccacagcgugcccagacacgaggugcccgacauccuggaggugcaccugccccacgcccagccccaggacgccggcguguacagcgccagauacaucggcggcaaccuguucaccagcgccuucaccagacugaucgugagaagaugcgaggcccagaaguggggccccgagugcaaccaccugugcaccgccugcaugaacaacggcgugugccacgaggacaccggcgagugcaucugcccccccggcuucaugggcagaaccugcgagaaggccugcgagcugcacaccuucggcagaaccugcaaggagagaugcagcggccaggagggcugcaagagcuacguguucugccugcccgaccccuacggcugcagcugcgccaccggcuggaagggccugcagugcaacgaggccugccaccccggcuucuacggccccgacugcaagcugagaugcagcugcaacaacggcgagaugugcgacagauuccagggcugccugugcagccccggcuggcagggccugcagugcgagagagagggcauccagagaaugacccccaagaucguggaccugcccgaccacaucgaggugaacagcggcaaguucaaccccaucugcaaggccagcggcuggccccugcccaccaacgaggagaugacccuggugaagcccgacggcaccgugcugcaccccaaggacuucaaccacaccgaccacuucagcguggccaucuucaccauccacagaauccugccccccgacagcggcgugugggugugcagcgugaacaccguggccggcaugguggagaagcccuucaacaucagcgugaaggugcugcccaagccccugaacgcccccaacgugaucgacaccggccacaacuucgccgugaucaacaucagcagcgagcccuacuucggcgacggccccaucaagagcaagaagcugcuguacaagcccgugaaccacuacgaggccuggcagcacauccaggugaccaacgagaucgugacccugaacuaccuggagcccagaaccgaguacgagcugugcgugcagcuggugagaagaggcgagggcggcgagggccaccccggccccgugagaagauucaccaccgccagcaucggccugcccccccccagaggccugaaccugcugcccaagagccagaccacccugaaccugaccuggcagcccaucuuccccagcagcgaggacgacuucuacguggagguggagagaagaagcgugcagaagagcgaccagcagaacaucaaggugcccggcaaccugaccagcgugcugcugaacaaccugcaccccagagagcaguacguggugagagccagagugaacaccaaggcccagggcgaguggagcgaggaccugaccgccuggacccugagcgacauccugcccccccagcccgagaacaucaagaucagcaacaucacccacagcagcgccgugaucagcuggaccauccuggacggcuacagcaucagcagcaucaccaucagauacaaggugcagggcaagaacgaggaccagcacguggacgugaagaucaagaacgccaccaucacccaguaccagcugaagggccuggagcccgagaccgccuaccagguggacaucuucgccgagaacaacaucggcagcagcaaccccgccuucagccacgagcuggugacccugcccgagagccaggcccccgccgaccugggcggcggcaagaugcugcugaucgccauccugggcagcgccggcaugaccugccugaccgugcugcuggccuuccugaucauccugcagcugaagagagccaacgugcagagaagaauggcccaggccuuccagaacgugagagaggagcccgccgugcaguucaacagcggcacccuggcccugaacagaaaggugaagaacaaccccgaccccaccaucuaccccgugcuggacuggaacgacaucaaguuccaggacgugaucggcgagggcaacuucggccaggugcugaaggccagaaucaagaaggacggccugagaauggacgccgccaucaagagaaugaaggaguacgccagcaaggacgaccacagagacuucgccggcgagcuggaggugcugugcaagcugggccaccaccccaacaucaucaaccugcugggcgccugcgagcacagaggcuaccuguaccuggccaucgaguacgccccccacggcaaccugcuggacuuccugagaaagagcagagugcuggagaccgaccccgccuucgccaucgccaacagcaccgccagcacccugagcagccagcagcugcugcacuucgccgccgacguggccagaggcauggacuaccugagccagaagcaguucauccacagagaccuggccgccagaaacauccuggugggcgagaacuacguggccaagaucgccgacuucggccugagcagaggccaggagguguacgugaagaagaccaugggcagacugcccgugagauggauggccaucgagagccugaacuacagcguguacaccaccaacagcgacguguggagcuacggcgugcugcugugggagaucgugagccugggcggcacccccuacugcggcaugaccugcgccgagcuguacgagaagcugccccagggcuacagacuggagaagccccugaacugcgacgacgagguguacgaccugaugagacagugcuggagagagaagcccuacgagagacccagcuucgcccagauccuggugagccugaacagaaugcuggaggagagaaagaccuacgugaacaccacccuguacgagaaguucaccuacgccggcaucgacugcagcgccgaggaggccgccuga

SEQ ID NO: 2996 - RNA, 1791 nt, Artificial Sequence
  BAF84950 variant
auggccgacgccgaggccagagccgaguuccccgaggaggccagacccgacagaggcacccugcaggugcugcaggacauggccagcagacugagaauccacagcaucagagccaccugcagcaccagcagcggccaccccaccagcugcagcagcagcagcgagaucaugagcgugcuguucuucuacaucaugagauacaagcagagcgaccccgagaaccccgacaacgacagauucgugcuggccaagagacugagcuucguggacguggccaccggcuggcugggccagggccugggcguggccugcggcauggccuacaccggcaaguacuucgacagagccagcuacagaguguucugccugaugagcgacggcgagagcagcgagggcagcgugugggaggccauggccuucgccagcuacuacagccuggacaaccugguggccaucuucgacgugaacagacugggccacagcggcgcccugcccgccgagcacugcaucaacaucuaccagagaagaugcgaggccuucggcuggaacaccuacgugguggacggcagagacguggaggcccugugccagguguucuggcaggccagccaggugaagcacaagcccaccgccgugguggccaagaccuucaagggcagaggcacccccagcaucgaggacgccgagagcuggcacgccaagcccaugcccagagagagagccgacgccaucaucaagcugaucgagagccagauccagaccagcagaaaccuggacccccagccccccaucgaggacagccccgaggugaacaucaccgacgugagaaugaccagcccccccgacuacagagugggcgacaagaucgccaccagaaaggccugcggccuggcccuggccaagcugggcuacgccaacaacagagugguggugcuggacggcgacaccagauacagcaccuucagcgagaucuucaacaaggaguaccccgagagauucaucgagugcuucauggccgagcagaacauggugagcguggcccugggcugcgccagcagaggcagaaccaucgccuucgccagcaccuucgccgccuuccugaccagagccuucgaccacaucagaaucggcggccuggccgagagcaacaucaacaucaucggcagccacugcggcgugagcgugggcgacgacggcgccagccagauggcccuggaggacaucgccauguucagaaccauccccaagugcaccaucuucuaccccaccgacgccgugagcaccgagcacgccguggcccuggccgccaacgccaagggcaugugcuucaucagaaccaccagacccgagaccauggugaucuacaccccccaggagagauucgagaucggccaggccaaggugcugagacacugcgugagcgacaaggugaccgugaucggcgccggcaucaccguguacgaggcccuggccgccgccgacgagcugagcaagcaggacaucuucaucagagugaucgaccuguucaccaucaagccccuggacguggccaccaucgugagcagcgccaaggccaccgagggcagaaucaucaccguggaggaccacuacccccagggcggcaucggcgaggccgugugcgccgccgugagcauggaccccgacauccaggugcacagccuggccgugagcggcgugccccagagcggcaagagcgaggagcugcuggacauguacggcaucagcgccagacacaucaucguggccgugaagugcaugcugcugaacuga

SEQ ID NO: 2997 - RNA, 861 nt, Artificial Sequence
  EAW88722 variant
auggccgaggacggcgaggaggccgaguuccacuucgccgcccuguacaucagcggccaguggcccagacugagagccgacaccgaccugcagagacugggcagcagcgccauggcccccagcagaaaguucuucgugggcggcaacuggaagaugaacggcagaaagcagagccugggcgagcugaucggcacccugaacgccgccaaggugcccgccgacaccgagguggugugcgccccccccaccgccuacaucgacuucgccagacagaagcuggaccccaagaucgccguggccgcccagaacugcuacaaggugaccaacggcgccuucaccggcgagaucagccccggcaugaucaaggacugcggcgccaccuggguggugcugggccacagcgagagaagacacguguucggcgagagcgacgagcugaucggccagaagguggcccacgcccuggccgagggccugggcgugaucgccugcaucggcgagaagcuggacgagagagaggccggcaucaccgagaaggugguguucgagcagaccaaggugaucgccgacaacgugaaggacuggagcaagguggugcuggccuacgagcccgugugggccaucggcaccggcaagaccgccaccccccagcaggcccaggaggugcacgagaagcugagaggcuggcugaagagcaacgugagcgacgccguggcccagagcaccagaaucaucuacggcggcagcgugaccggcgccaccugcaaggagcuggccagccagcccgacguggacggcuuccuggugggcggcgccagccugaagcccgaguucguggacaucaucaacgccaagcaguga

SEQ ID NO: 2998 - RNA, 357 nt, Artificial Sequence
  CAA72108 variant
augccccuggugguggccgugaucuucuucagccuguggguguucgcccugggccagcuggagcagcccgagaucagcaucagcagacccgccaacaagagcgcccacaucagcuggaaggccagcauccagggcuucagcagcaagaucauccacugguacuggcagaagcccaacaagggccuggaguaccugcugcacguguuccugaccaucagcgcccaggacugcagcggcggcaagaccaagaagcuggaggugagcaagaacgcccacaccagcaccagcacccugaagaucaaguuccuggagaaggaggacgaggugguguaccacugcgccugcuggaucagacac

SEQ ID NO: 2999 - RNA, 414 nt, Artificial Sequence
  EAL23985 variant
augcugagccugcugcacaccagcacccuggccgugcugggcgcccugugcguguacggcgccggccaccuggagcagccccagaucagcagcaccaagacccugagcaagaccgccagacuggagugcguggugagcggcaucaccaucagcgccaccagcguguacugguacagagagagacccggcgaggugauccaguuccuggugagcaucagcuacgacggcaccgugagaaaggagagcggcauccccagcggcaaguucgagguggacagaauccccgagaccagcaccagcacccugaccauccacaacguggagaagcaggacaucgccaccuacuacugcgcccugugggaggugcacagcagcagacaguucgagcccagccacagcaucaacguguacuga

SEQ ID NO: 3000 - RNA, 366 nt, Artificial Sequence
  CAA30181 variant
augcugagccugcugcacaccagcacccuggccgugcugggcgcccugugcguguacggcgccggccaccuggagcagccccagaucagcagcaccaagacccugagcaagaccgccagacuggagugcguggugagcggcaucaccaucagcgccaccagcguguacugguacagagagagacccggcgaggugauccaguuccuggugagcaucagcuacgacggcaccgugagaaaggagagcggcauccccagcggcaaguucgagguggacagaauccccgagaccagcaccagcacccugaccauccacaacguggagaagcaggacaucgccaccuacuacugcgcccugugggaggug

SEQ ID NO: 3001 - RNA, 366 nt, Artificial Sequence
  CAA33345 variant
augcugagccugcugcacaccagcacccuggccgugcugggcgcccugugcguguacggcgccggccaccuggagcagccccagaucagcagcaccaagacccugagcaagaccgccagacuggagugcguggugagcggcaucaagaucagcgccaccagcguguacugguacagagagagacccggcgaggugauccaguuccuggugagcaucagcuacgacggcaccgugagaaaggagagcggcauccccagcggcaaguucgagguggacagaauccccgagaccagcaccagcacccugaccauccacaacguggagaagcaggacaucgccaccuacuacugcgcccugugggaggug

SEQ ID NO: 3002 - RNA, 2382 nt, Artificial Sequence
  AAA93251 variant
augauggccgcccuguaccccagcaccgaccugagcggcgccagcagcagcagccugcccagcagccccagcagcagcagccccaacgaggugauggcccugaaggacgugagagaggugaaggaggagaacacccugaacgagaagcuguuccugcuggccugcgacaagggcgacuacuacauggugaagaagauccuggaggagaacagcagcggcgaccugaacaucaacugcguggacgugcugggcagaaacgccgugaccaucaccaucgagaacgagaaccuggacauccugcagcugcugcuggacuacggcugccagagcgccgacgcccugcugguggccaucgacagcgagguggugggcgccguggacauccugcugaaccacagacccaagagaagcagcagacccaccaucgugaagcugauggagagaauccagaaccccgaguacagcaccaccauggacguggcccccgugauccuggccgcccacagaaacaacuacgagauccugaccaugcugcugaagcaggacgugagccugcccaagccccacgccgugggcugcgagugcacccugugcagcgccaagaacaagaaggacagccugagacacagcagauucagacuggacaucuacagaugccuggccagccccgcccugaucaugcugaccgaggaggaccccauccugagagccuucgagcugagcgccgaccugaaggagcugagccugguggagguggaguucagaaacgacuacgaggagcuggccagacagugcaagauguucgccaaggaccugcuggcccaggccagaaacagcagagagcuggaggugauccugaaccacaccagcagcgacgagccccuggacaagagaggccugcuggaggagagaaugaaccugagcagacugaagcuggccaucaaguacaaccagaaggaguucgugagccagagcaacugccagcaguuccugaacaccgugugguucggccagaugagcggcuacagaagaaagcccaccugcaagaagaucaugaccgugcugaccgugggcaucuucuggcccgugcugagccugugcuaccugaucgcccccaagagccaguucggcagaaucauccacacccccuucaugaaguucaucauccacggcgccagcuacuucaccuuccugcugcugcugaaccuguacagccugguguacaacgaggacaagaagaacaccaugggccccgcccuggagagaaucgacuaccugcugauccuguggaucaucggcaugaucuggagcgacaucaagagacugugguacgagggccuggaggacuuccuggaggagagcagaaaccagcugagcuucgugaugaacagccuguaccuggccaccuucgcccugaaggugguggcccacaacaaguuccacgacuucgccgacagaaaggacugggacgccuuccaccccacccugguggccgagggccuguucgccuucgccaacgugcugagcuaccugagacuguucuucauguacaccaccagcagcauccugggcccccugcagaucagcaugggccagaugcugcaggacuucggcaaguuccugggcauguuccugcuggugcuguucagcuucaccaucggccugacccagcuguacgacaagggcuacaccagcaaggagcagaaggacugcgugggcaucuucugcgagcagcagagcaacgacaccuuccacagcuucaucggcaccugcuucgcccuguucugguacaucuucagccuggcccacguggccaucuucgugaccagauucagcuacggcgaggagcugcagagcuucgugggcgccgugaucgugggcaccuacaacguggugguggugaucgugcugaccaagcugcugguggccaugcugcacaagagcuuccagcugaucgccaaccacgaggacaaggaguggaaguucgccagagccaagcuguggcugagcuacuucgacgacaagugcacccugcccccccccuucaacaucauccccagccccaagaccaucugcuacaugaucagcagccugagcaaguggaucugcagccacaccagcaagggcaaggugaagagacagaacagccugaaggaguggagaaaccugaagcagaagagagacgagaacuaccagaaggugaugugcugccuggugcacagauaccugaccagcaugagacagaagaugcagagcaccgaccaggccaccguggagaaccugaacgagcugagacaggaccugagcaaguucagaaacgagaucagagaccugcugggcuucagaaccagcaaguacgccauguucuaccccagaaacuga

SEQ ID NO: 3003 - RNA, 3315 nt, Artificial Sequence
  AAZ73614 variant
augagcuucagagccgccagacugagcaugagaaacagaagaaacgacacccuggacagcaccagaacccuguacagcagcgccagcagaagcaccgaccugagcuacagcgagagcgaccuggugaacuucauccaggccaacuucaagaagagagagugcguguucuucaccaaggacagcaaggccaccgagaacgugugcaagugcggcuacgcccagagccagcacauggagggcacccagaucaaccagagcgagaaguggaacuacaagaagcacaccaaggaguuccccaccgacgccuucggcgacauccaguucgagacccugggcaagaagggcaaguacaucagacugagcugcgacaccgacgccgagauccuguacgagcugcugacccagcacuggcaccugaagacccccaaccuggugaucagcgugaccggcggcgccaagaacuucgcccugaagcccagaaugagaaagaucuucagcagacugaucuacaucgcccagagcaagggcgccuggauccugaccggcggcacccacuacggccugaugaaguacaucggcgagguggugagagacaacaccaucagcagaagcagcgaggagaacaucguggccaucggcaucgccgccuggggcauggugagcaacagagacacccugaucagaaacugcgacgccgagggcuacuuccuggcccaguaccugauggacgacuucaccagagacccccuguacauccuggacaacaaccacacccaccugcugcugguggacaacggcugccacggccaccccaccguggaggccaagcugagaaaccagcuggagaaguacaucagcgagagaaccauccaggacagcaacuacggcggcaagauccccaucgugugcuucgcccagggcggcggcaaggagacccugaaggccaucaacaccagcaucaagaacaagauccccugcguggugguggagggcagcggccagaucgccgacgugaucgccagccugguggagguggaggacgcccugaccagcagcgccgugaaggagaagcuggugagauuccugcccagaaccgugagcagacugcccgaggaggagaccgagagcuggaucaaguggcugaaggagauccuggagugcagccaccugcugaccgugaucaagauggaggaggccggcgacgagaucgugagcaacgccaucagcuacgcccuguacaaggccuucagcaccagcgagcaggacaaggacaacuggaacggccagcugaagcugcugcuggaguggaaccagcuggaccuggccaacgacgagaucuucaccaacgacagaagaugggagagcgccgaccugcaggaggugauguucaccgcccugaucaaggacagacccaaguucgugagacuguuccuggagaacggccugaaccugagaaaguuccugacccacgacgugcugaccgagcuguucagcaaccacuucagcacccugguguacagaaaccugcagaucgccaagaacagcuacaacgacgcccugcugaccuucguguggaagcugguggccaacuucagaagaggcuucagaaaggaggacagaaacggcagagacgagauggacaucgagcugcacgacgugagccccaucaccagacacccccugcaggcccuguucaucugggccauccugcagaacaagaaggagcugagcaaggugaucugggagcagaccagaggcugcacccuggccgcccugggcgccagcaagcugcugaagacccuggccaaggugaagaacgacaucaacgccgccggcgagagcgaggagcuggccaacgaguacgagaccagagccguggagcuguucaccgagugcuacagcagcgacgaggaccuggccgagcagcugcugguguacagcugcgaggccuggggcggcagcaacugccuggagcuggccguggaggccaccgaccagcacuucaucgcccagcccggcgugcagaacuuccugagcaagcagugguacggcgagaucagcagagacaccaagaacuggaagaucauccugugccuguucaucaucccccuggugggcugcggcuucgugagcuucagaaagaagcccguggacaagcacaagaagcugcugugguacuacguggccuucuucaccagccccuucgugguguucagcuggaacgugguguucuacaucgccuuccugcugcuguucgccuacgugcugcugauggacuuccacagcgugccccacccccccgagcuggugcuguacagccugguguucgugcuguucugcgacgaggugagacagugguacgugaacggcgugaacuacuucaccgaccuguggaacgugauggacacccugggccuguucuacuucaucgccggcaucguguucagacugcacagcagcaacaagagcagccuguacagcggcagagugaucuucugccuggacuacaucaucuucacccugagacugauccacaucuucaccgugagcagaaaccugggccccaagaucaucaugcugcagagaaugcugaucgacguguucuucuuccuguuccuguucgccguguggaugguggccuucggcguggccagacagggcauccugagacagaacgagcagagauggagauggaucuucagaagcgugaucuacgagcccuaccuggccauguucggccaggugcccagcgacguggacggcaccaccuacgacuucgcccacugcaccuucaccggcaacgagagcaagccccugugcguggagcuggacgagcacaaccugcccagauuccccgaguggaucaccaucccccuggugugcaucuacaugcugagcaccaacauccugcuggugaaccugcugguggccauguucggcuacaccgugggcaccgugcaggagaacaacgaccagguguggaaguuccagagauacuuccuggugcaggaguacugcagcagacugaacauccccuuccccuucaucguguucgccuacuucuacaugguggugaagaagugcuucaagugcugcugcaaggagaagaacauggagagcagcgugugcugcuucaagaacgaggacaacgagacccuggccugggagggcgugaugaaggagaacuaccuggugaagaucaacaccaaggccaacgacaccagcgaggagaugagacacagauucagacagcuggacaccaagcugaacgaccugaagggccugcugaaggagaucgccaacaagaucaaguga

SEQ ID NO: 3004 - RNA, 2097 nt, Artificial Sequence
  AAK13079 variant
augaugagaagcagaagcaagagccccagaagacccagccccaccgccagaggcgccaacugcgacguggagcugcugaagaccaccaccagagacagagaggagcugaagugcaugcuggagaaguacgagagacaccuggccgagauccagggcaacgugaaggugcugaagagcgagagagacaagaucuuccugcuguacgagcaggcccaggaggagaucaccagacugagaagagagaugaugaagagcugcaagagccccaagagcaccaccgcccacgccauccugagaagaguggagaccgagagagacguggccuucaccgaccugagaagaaugaccaccgagagagacagccugagagagagacugaagaucgcccaggagaccgccuucaacgagaaggcccaccuggagcagagaaucgaggagcuggagugcaccgugcacaaccuggacgacgagagaauggagcagaugagcaacaugacccugaugaaggagaccaucagcaccguggagaaggagaugaagagccuggccagaaaggccauggacaccgagagcgagcugggcagacagaaggccgagaacaacagccugagacugcuguacgagaacaccgagaaggaccugagcgacacccagagacaccuggccaagaagaaguacgagcugcagcugacccaggagaagaucaugugccuggacgagaagaucgacaacuucaccagacagaacaucgcccagagagaggagaucagcauccugggcggcacccugaacgaccuggccaaggagaaggagugccugcaggccugccuggacaagaagagcgagaacaucgccagccugggcgagagccuggccaugaaggagaagaccaucagcggcaugaagaacaucaucgccgagauggagcaggccagcagacagugcaccgaggcccugaucgugugcgagcaggacgugagcagaaugagaagacagcuggacgagaccaacgacgagcuggcccagaucgccagagagagagacauccuggcccacgacaacgacaaccugcaggagcaguucgccaaggccaagcaggagaaccaggcccugagcaagaagcugaacgacacccacaacgagcugaacgacaucaagcagaaggugcaggacaccaaccuggaggugaacaagcugaagaacauccugaagagcgaggagagcgagaacagacagaugauggagcagcugagaaaggccaacgaggacgccgagaacugggagaacaaggccagacagagcgaggccgacaacaacacccugaagcuggagcugaucaccgccgaggccgagggcaacagacugaaggagaagguggacagccugaacagagagguggagcagcaccugaacgccgagagaagcuacaagagccagaucagcacccugcacaagagcguggugaagauggaggaggagcugcagaaggugcaguucgagaaggugagcgcccuggccgaccugagcagcaccagagagcugugcaucaagcuggacagcagcaaggagcugcugaacagacagcugguggccaaggaccaggagaucgagaugagagagaacgagcuggacagcgcccacagcgagaucgagcugcugagaagccagauggccaacgagagaaucagcaugcagaaccuggaggcccugcugguggccaacagagacaaggaguaccagagccagaucgcccugcaggagaaggagagcgagauccagcugcugaaggagcaccugugccuggccgagaacaagauggccauccagagcagagacguggcccaguucagaaacguggugacccagcuggaggccgaccuggacaucaccaagagacagcugggcaccgagagauucgagagagagagagccgugcaggagcugagaagacagaacuacagcagcaacgccuaccacaugagcagcaccaugaagcccaacaccaagugccacagccccgagagagcccaccacagaagccccgacagaggccuggacagaagccuggaggagaaccugugcuacagagacuucuga

SEQ ID NO: 3005 - RNA, 927 nt, Artificial Sequence
  CCDS48205.1 variant
augagacccgagggcagccugaccuacagagugcccgagagacugagacagggcuucugcggcgugggcagagccgcccaggcccuggugugcgccagcgccaaggagggcaccgccuucagaauggaggccgugcaggagggcgccgccggcguggagagcgagcaggccgcccugggcgaggaggccgugcugcugcuggacgacaucauggccgagguggaggugguggccgaggaggagggccugguggagagaagagaggaggcccagagagcccagcaggccgugcccggccccggccccaugacccccgagagcgcccccgaggagcugcuggccgugcagguggagcuggagcccgugaacgcccaggccagaaaggccuucagcagacagagagagaagauggagagaagaagaaagccccaccuggacagaagaggcgccgugauccagagcgugcccggcuucugggccaacgugaucgccaaccacccccagaugagcgcccugaucaccgacgaggacgaggacaugcugagcuacauggugagccuggaggugggcgaggagaagcaccccgugcaccugugcaagaucaugcuguucuucagaagcaaccccuacuuccagaacaaggugaucaccaaggaguaccuggugaacaucaccgaguacagagccagccacagcacccccaucgagugguaccccgacuacgagguggaggccuacagaagaagacaccacaacagcagccugaacuucuucaacugguucagcgaccacaacuucgccggcagcaacaagaucgccgagauccugugcaaggaccuguggagaaacccccugcaguacuacaagagaaugaagccccccgaggagggcaccgagaccagcggcgacagccagcugcugagcuga

SEQ ID NO: 3006 - RNA, 369 nt, Artificial Sequence
  M13231.1 variant
augagaugggcccugcuggugcugcuggccuuccugagccccgccagccagaagagcagcaaccuggagggcagaaccaagagcgugaccagacagaccggcagcagcgccgagaucaccugcgaccugaccgugaccaacaccuucuacauccacugguaccugcaccaggagggcaaggccccccagagacugcuguacuacgacgugagcaccgccagagacgugcuggagagcggccugagccccggcaaguacuacacccacacccccagaagauggagcuggauccugagacugcagaaccugaucgagaacgacagcggcguguacuacugcgccaccugggacagacagaagcugcuguga

SEQ ID NO: 3007 - RNA, 804 nt, Artificial Sequence
  CCDS12619.1 variant
augggcgccagacagauccagaccagcagcagccagaccagccccgaggaggccaugggcacccccagaauccagcaccugcugauccugcuggugcugggcgccagccugcugaccagcggccuggagcuguacugccagaagggccugagcaugaccguggaggccgaccccgccaacauguucaacuggaccaccgaggagguggagaccugcgacaagggcgcccugugccaggagaccauccugaucaucaaggccggcaccgagaccgccauccuggccaccaagggcugcauccccgagggcgaggaggccaucaccaucgugcagcacagcagcccccccggccugaucgugaccagcuacagcaacuacugcgaggacagcuucugcaacgacaaggacagccugagccaguucugggaguucagcgagaccaccgccagcaccgugagcaccacccugcacugccccaccugcguggcccugggcaccugcuucagcgcccccagccugcccugccccaacggcaccaccagaugcuaccagggcaagcuggagaucaccggcggcggcaucgagagcagcguggaggugaagggcugcaccgccaugaucggcugcagacugaugagcggcauccuggccgugggccccauguucgugagagaggccugcccccaccagcugcugacccagcccagaaagaccgagaacggcgccaccugccugcccauccccguguggggccugcagcugcugcugccccugcugcugcccagcuucauccacuucagcuga

SEQ ID NO: 3008 - RNA, 1590 nt, Artificial Sequence
  AHZ44440 variant
augcugcuggccgugcuguacugccugcuguggagcuuccagaccagcgccggccacuuccccagagccugcgugagcagcaagaaccugauggagaaggagugcugcccccccuggagcggcgacagaagccccugcggccagcugagcggcagaggcagcugccagaacauccugcugagcaacgccccccugggcccccaguuccccuucaccggcguggacgacagagagagcuggcccagcguguucuacaacagaaccugccagugcagcggcaacuucaugggcuucaacugcggcaacugcaaguucggcuucuggggccccaacugcaccgagagaagacugcuggugagaagaaacaucuucgaccugagcgcccccgagaaggacaaguucuucgccuaccugacccuggccaagcacaccaucagcagcgacuacgugauccccaucggcaccuacggccagaugaagaacggcagcacccccauguucaacgacaucaacaucuacgaccuguucguguggaugcacuacuacgugagcauggacgcccugcugggcggcagcgagaucuggagagacaucgacuucgcccacgaggcccccgccuuccugcccuggcacagacuguuccugcugagaugggagcaggagauccagaagcugaccggcgacgagaacuucaccauccccuacugggacuggagagacgccgagaagugcgacaucugcaccgacgaguacaugggcggccagcaccccaccaaccccaaccugcugagccccgccagcuucuucagcagcuggcagaucgugugcagcagacuggaggaguacaacagccaccagagccugugcaacggcacccccgagggcccccugagaagaaaccccggcaaccacgacaagagcagaacccccagacugcccagcagcgccgacguggaguucugccugagccugacccaguacgagagcggcagcauggacaaggccgccaacuucagcuucagaaacacccuggagggcuucgccagcccccugaccggcaucgccgacgccagccagagcagcaugcacaacgcccugcacaucuacaugaacggcaccaugagccaggugcagggcagcgccaacgaccccaucuuccugcugcaccacgccuucguggacagcaucuucgagcaguggcugagaagacacagaccccugcaggagguguaccccgaggccaacgcccccaucagacacaacagagagagcuacauggugcccuucaucccccuguacagaaacggcgacuucuucaucagcagcaaggaccugggcuacgacuacagcuaccugcaggacagcgaccccgacagcuuccaggacuacaucaagagcuaccuggagcaggccagcagaaucuggagcuggcugcugggcgccgccauggugggcgccgugcugaccgcccugcuggccggccuggugagccugcugugcagacacaagagaaagcagcugcccgaggagaagcagccccugcugauggagaaggaggacuaccacagccuguaccagagccaccuguga

SEQ ID NO: 3009 - RNA, 1590 nt, Artificial Sequence
  AGV39051 variant
augcugcuggccgugcuguacugccugcuguggagcuuccagaccagcgccggccacuuccccagagccugcgugagcagcaagaaccugauggagaaggagugcugcccccccuggagcggcgacagaagccccugcggccagcugagcggcagaggcagcugccagaacauccugcugagcaacgccccccugggcccccaguuccccuucaccggcguggacgacagagagagcuggcccagcguguucuacaacagaaccugccagugcagcggcaacuucaugggcuucaacugcggcaacugcaaguucggcuucuggggccccaacugcaccgagagaagacugcuggugagaagaaacaucuucgaccugagcgcccccgagaaggacaaguucuucgccuaccugacccuggccaagcacaccaucagcagcgacuacgugauccccaucggcaccuacggccagaugaagaacggcagcacccccauguucaacgacaucaacaucuacgaccuguucguguggaugcacuacuacgugagcauggacgcccugcugggcggcagcgagaucuggagagacaucgacuucgcccacgaggcccccgccuuccugcccuggcacagacuguuccugcugagaugggagcaggagauccagaagcugaccggcgacgagaacuucaccauccccuacugggacuggagagacgccgagaagugcgacaucugcaccgacgaguacaugggcggccagcaccccaccaaccccaaccugcugagccccgccagcuucuucagcagcuggcagaucgugugcagcagacuggaggaguacaacagccaccagagccugugcaacggcacccccgagggcccccugagaagaaaccccggcaaccacgacaagagcagaacccccagacugcccagcagcgccgacguggaguucugccugagccugacccaguacgagagcggcagcauggacaaggccgccaacuucagcuucagaaacacccuggagggcuucgccagcccccugaccggcaucgccgacgccagccagagcagcaugcacaacgcccugcacaucuacaugaacggcaccaugagccaggugcagggcagcgccaacgaccccaucuuccugcugcaccacgccuucguggacagcaucuucgagcaguggcugagaagacacagaccccugcaggagguguaccccgaggccaacgcccccaucggccacaacagagagagcuacauggugcccuucaucccccuguacagaaacggcgacuucuucaucagcagcaaggaccugggcuacgacuacagcuaccugcaggacagcgaccccgacagcuuccaggacuacaucaagagcuaccuggagcaggccagcagaaucuggagcuggcugcugggcgccgccauggugggcgccgugcugaccgcccugcuggccggccuggugagccugcugugcagacacaagagaaagcagcugcccgaggagaagcagccccugcugauggagaaggaggacuaccacagccuguaccagagccaccuguga

SEQ ID NO: 3010 - RNA, 1590 nt, Artificial Sequence
  AGV39049 variant
augcugcuggccgugcuguacugccugcuguggagcuuccagaccagcgccggccacuuccccagagccugcgugagcagcaagaaccugauggagaaggagugcugcccccccuggagcggcgacagaagccccugcggccagcugagcggcagaggcagcugccagaacauccugcugagcaacgccccccugggcccccaguuccccuucaccggcguggacgacagagagagcuggcccagcguguucuacaacagaaccugccagugcagcggcaacuucaugggcuucaacugcggcaacugcaaguucggcuucuggggccccaacugcaccgagagaagacugcuggugagaagaaacaucuucgaccugagcgcccccgagaaggacaaguucuucgccuaccugacccuggccaagcacaccaucagcagcgacuacgugauccccaucggcaccuacggccagaugaagaacggcagcacccccauguucaacgacaucaacaucuacgaccuguucguguggaugcacuacuacgugagcauggacgcccugcugggcggcagcgagaucuggagagacaucgacuucgcccacgaggcccccgccuuccugcccuggcacagacuguuccugcugagaugggagcaggagauccagaagcugaccggcgacgagaacuucaccauccccuacugggacuggagagacgccgagaagugcgacaucugcaccgacgaguacaugggcggccagcaccccaccaaccccaaccugcugagccccgccagcuucuucagcagcuggcagaucgugugcagcagacuggaggaguacaacagccaccagagccugugcaacggcacccccgagggcccccugagaagaaaccccggcaaccacgacaagagcagaacccccagacugcccagcagcgccgacguggaguucugccugagccugacccaguacgagagcggcagcauggacaaggccgccaacuucagcuucagaaacacccuggagggcuucgccagcccccugaccggcaucgccgacgccagccagagcagcaugcacaacgcccugcacaucuacaugaacggcaccaugagccaggugcagggcagcgccaacgaccccaucuuccugcugcaccacgccuucguggacagcaucuucgagcaguggcugcagagacacagaccccugcaggagguguaccccgaggccaacgcccccaucggccacaacagagagagcuacauggugcccuucaucccccuguacagaaacggcgacuucuucaucagcagcaaggaccugggcuacgacuacagcuaccugcaggacagcgaccccgacagcuuccaggacuacaucaagagcuaccuggagcaggccagcagaaucuggagcuggcugcugggcgccgccauggugggcgccgugcugaccgcccugcuggccggccuggugagccugcugugcagacacaagagaaagcagcugcccgaggagaagcagccccugcugauggagaaggaggacuaccacagccuguaccagagccaccuguga

SEQ ID NO: 3011 - RNA, 1590 nt, Artificial Sequence
  AGV39050 variant
augcugcuggccgugcuguacugccugcuguggagcuuccagaccagcgccggccacuuccccagagccugcgugagcagcaagaaccugauggagaaggagugcugcccccccuggagcggcgacagaagccccugcggccagcugagcggcagaggcagcugccagaacauccugcugagcaacgccccccugggcccccaguuccccuucaccggcguggacgacagagagagcuggcccagcguguucuacaacagaaccugccagugcagcggcaacuucaugggcuucaacugcggcaacugcaaguucggcuucuggggccccaacugcaccgagagaagacugcuggugagaagaaacaucuucgaccugagcgcccccgagaaggacaaguucuucgccuaccugacccuggccaagcacaccaucagcagcgacuacgugauccccaucggcaccuacggccagaugaagaacggcagcacccccauguucaacgacaucaacaucuacgaccuguucguguggaugcacuacuacgugagcauggacgcccugcugggcggcuacgagaucuggagagacaucgacuucgcccacgaggcccccgccuuccugcccuggcacagacuguuccugcugagaugggagcaggagauccagaagcugaccggcgacgagaacuucaccauccccuacugggacuggagagacgccgagaagugcgacaucugcaccgacgaguacaugggcggccagcaccccaccaaccccaaccugcugagccccgccagcuucuucagcagcuggcagaucgugugcagcagacuggaggaguacaacagccaccagagccugugcaacggcacccccgagggcccccugagaagaaaccccggcaaccacgacaagagcagaacccccagacugcccagcagcgccgacguggaguucugccugagccugacccaguacgagagcggcagcauggacaaggccgccaacuucagcuucagaaacacccuggagggcuucgccagcccccugaccggcaucgccgacgccagccagagcagcaugcacaacgcccugcacaucuacaugaacggcaccaugagccaggugcagggcagcgccaacgaccccaucuuccugcugcaccacgccuucguggacagcaucuucgagcaguggcugagaagacacagaccccugcaggagguguaccccgaggccaacgcccccaucggccacaacagagagagcuacauggugcccuucaucccccuguacagaaacggcgacuucuucaucagcagcaaggaccugggcuacgacuacagcuaccugcaggacagcgaccccgacagcuuccaggacuacaucaagagcuaccuggagcaggccagcagaaucuggagcuggcugcugggcgccgccauggugggcgccgugcugaccgcccugcuggccggccuggugagccugcugugcagacacaagagaaagcagcugcccgaggagaagcagccccugcugauggagaaggaggacuaccacagccuguaccagagccaccuguga

SEQ ID NO: 3012 - RNA, 714 nt, Artificial Sequence
  CAA04137 variant
augagcccccugugguggggcuuccugcugagcugccugggcugcaagauccugcccggcgcccagggccaguuccccagagugugcaugaccguggacagccuggugaacaaggagugcugccccagacugggcgccgagagcgccaacgugugcggcagccagcagggcagaggccagugcaccgaggugagagccgacaccagacccuggagcggccccuacauccugagaaaccaggacgacagagagcuguggcccagaaaguucuuccacagaaccugcaagugcaccggcaacuucgccggcuacaacugcggcgacugcaaguucggcuggaccggccccaacugcgagagaaagaagccccccgugaucagacagaacauccacagccugagcccccaggagagagagcaguuccugggcgcccuggaccuggccaagaagagagugcaccccgacuacgugaucaccacccagcacugggugggccugcugggccccaacggcacccagccccaguucgccaacugcagcguguacgacuucuucguguggcugcacuacuacagcgugagagacacccugcugggcggcuucuuccccuggcugaagguguacuacuacagauucgugaucggccugagaguguggcagugggaggugaucagcugcaagcugaucaagagagccaccaccagacagcccuga

SEQ ID NO: 3013 - RNA, 1590 nt, Artificial Sequence; identical to SEQ ID NO: 3009
  AAA61242 variant

SEQ ID NO: 3014 - RNA, 1590 nt, Artificial Sequence
  AGV39054 variant
augcugcuggccgugcuguacugccugcuguggagcuuccagaccagcgccggccacuuccccagagccugcgugagcagcaagaaccugauggagaaggagugcugcccccccuggagcggcgacagaagccccugcggccagcugagcggcagaggcagcugccagaacauccugcugagcaacgccccccugggcccccaguuccccuucaccggcguggacgacagagagagcuggcccagcguguucuacaacagaaccugccagugcagcggcaacuucaugggcuucaacugcggcaacugcaaguucggcuucuggggccccaacugcaccgagagaagacugcuggugagaagaaacaucuucgaccugagcgcccccgagaaggacaaguucuucgccuaccugacccuggccaagcacaccaucagcagcgacuacgugauccccaucggcaccuacggccagaugaagaacggcagcacccccauguucaacgacaucaacaucuacgaccuguucguguggaugcacuacuacgugagcauggacgcccugcugggcggcagcgagaucuggagagacaucgacuucgcccacgaggcccccgccuuccugcccuggcacagacuguuccugcugagaugggagcaggagauccagaagcugaccggcgacgagaacuucaccauccccuacugggacuggagagacgccgagaagugcgacaucugcaccgacgaguacgugggcggccagcaccccaccaaccccaaccugcugagccccgccagcuucuucagcagcuggcagaucgugugcagcagacuggaggaguacaacagccaccagagccugugcaacggcacccccgagggcccccugagaagaaaccccggcaaccacgacaagagcagaacccccagacugcccagcagcgccgacguggaguucugccugagccugacccaguacgagagcggcagcauggacaaggccgccaacuucagcuucagaaacacccuggagggcuucgccagcccccugaccggcaucgccgacgccagccagagcagcaugcacaacgcccugcacaucuacaugaacggcaccaugagccaggugcagggcagcgccaacgaccccaucuuccugcugcaccacgccuucguggacagcaucuucgagcaguggcugagaagacacagaccccugcaggagguguaccccgaggccaacgcccccaucggccacaacagagagagcuacauggugcccuucaucccccuguacagaaacggcgacuucuucaucagcagcaaggaccugggcuacgacuacagcuaccugcaggacagcgaccccgacagcuuccaggacuacaucaagagcuaccuggagcaggccagcagaaucuggagcuggcugcugggcgccgccauggugggcgccgugcugaccgcccugcuggccggccuggugagccugcugugcagacacaagagaaagcagcugcccgaggagaagcagccccugcugauggagaaggaggacuaccacagccuguaccagagccaccuguga

SEQ ID NO: 3015 - RNA, 1590 nt, Artificial Sequence
  AGV39162 variant
augcugcuggccgugcuguacugccugcuguggagcuuccagaccagcgccggccacuuccccagagccugcgugagcagcaagaaccugauggagaaggagugcugcccccccuggagcggcgacagaagccccugcggccagcugagcggcagaggcagcugccagaacauccugcugagcaacgccccccugggcccccaguuccccuucaccggcguggacgacagagagagcuggcccagcguguucuacaacagaaccugccagugcagcggcaacuucaugggcuucaacugcggcaacugcaaguucggcuucuggggccccaacugcaccgagagaagacugcuggugagaagaaacaucuucgaccugagcgcccccgagaaggacaaguucuucgccuaccugacccuggccaagcacaccaucagcagcgacuacgugauccccaucggcaccuacggccagaugaagaacggcagcacccccauguucaacgacaucaacaucuacgaccuguucguguggaugcacuacuacgugagcauggacgcccugcugggcggcagcgagaucuggagagacaucgacuucgcccacgaggcccccgccuuccugcccuggcacagacuguuccugcugagaugggagcaggagauccagaagcugaccggcgacgagaacuucaccauccccuacugggacuggagagacgccgagaagugcgacaucugcaccgacgaguacaugggcggccagcaccccaccaaccccaaccugcugagccccgccagcuucuucagcagcuggcagaucgugugcagcagacuggaggaguacaacagccaccagagccugugcaacggcacccccgagggcccccugagaagaaaccccggcaaccacgacaagagcagaacccccagacugcccagcagcgccgacguggaguucugccugagccugacccaguacgagagcggcagcauggacaaggccgccaacuucagcuucagaaacacccuggagggcuucgccagcccccugaccggcaucgccgacgccagccagagcagcaugcacaacgcccugcacaucuacaugaacggcaccaugagccaggugcagggcagcgccaacgaccccaucuuccugcugcaccacgccuucguggacagcaucuucgagcaguggcugagaagacacagacugcugcaggagguguaccccgaggccaacgcccccaucggccacaacagagagagcuacauggugcccuucaucccccuguacagaaacggcgacuucuucaucagcagcaaggaccugggcuacgacuacagcuaccugcaggacagcgaccccgacagcuuccaggacuacaucaagagcuaccuggagcaggccagcagaaucuggagcuggcugcugggcgccgccauggugggcgccgugcugaccgcccugcuggccggccuggugagccugcugugcagacacaagagaaagcagcugcccgaggagaagcagccccugcugauggagaaggaggacuaccacagccuguaccagagccaccuguga

SEQ ID NO: 3016 - RNA, 1590 nt, Artificial Sequence
  AGV39086 variant
augcugcuggccgugcuguacugccugcuguggagcuuccagaccagcgccggccacuuccccagagccugcgugagcagcaagaaccugauggagaaggagugcugcccccccuggagcggcgacagaagccccugcggccagcugagcggcagaggcagcugccagaacauccugcugagcaacgccccccugggcccccaguuccccuucaccggcguggacgacagagagagcuggcccagcguguucuacaacagaaccugccagugcagcggcaacuucaugggcuucaacugcggcaacugcaaguucggcuucuggggccccaacugcaccgagagaagacugcuggugagaagaaacaucuucgaccugagcgcccccgagaaggacaaguucuucgccuaccugacccuggccaagcacaccaucagcagcgacuacgugauccccaucggcaccuacggccagaugaagaacggcagcacccccauguucaacgacaucaacaucuacgaccuguucguguggaugcacuacuacgugagcauggacgcccugcugggcggcagcgagaucuggagagacaucgacuucgcccacgaggcccccgccuuccugcccuggcacagacuguuccugcugagaugggagcaggagauccagaagcugaccggcgacgagaacuucaccauccccuacugggacuggagagacgccgagaagugcgacaucugcaccgacgaguacaugggcggccagcaccccaccaaccccaaccugcugagccccgccagcuucuucagcagcuggcagaucgugugcagcagacuggaggaguacaacagccaccagagccugugcaacggcacccccgagggcccccugagaagaaaccccggcaaccacgacaagagcagaacccccagacugcccagcagcgccgacguggaguucugccugagccugacccaguacgagagcggcagcauggacaaggccgccaacuucagcuucagaaacacccuggagggcuucgccagcccccugaccggcaucgccgacgccagccagagcagcaugcacaacgcccugcacaucuacaugaacggcaccaugagccaggugcagggcagcgccaacgaccccaucuuccugcugcaccacgccuucguggacagcauguucgagcaguggcugagaagacacagaccccugcaggagguguaccccgaggccaacgcccccaucggccacaacagagagagcuacauggugcccuucaucccccuguacagaaacggcgacuucuucaucagcagcaaggaccugggcuacgacuacagcuaccugcaggacagcgaccccgacagcuuccaggacuacaucaagagcuaccuggagcaggccagcagaaucuggagcuggcugcugggcgccgccauggugggcgccgugcugaccgcccugcuggccggccuggugagccugcugugcagacacaagagaaagcagcugcccgaggagaagcagccccugcugauggagaaggaggacuaccacagccuguaccagagccaccuguga

SEQ ID NO: 3017 - RNA, 1614 nt, Artificial Sequence
  AAC15468 variant
augagcgcccccaagcugcugagccugggcugcaucuucuucccccugcugcuguuccagcaggccagagcccaguuccccagacagugcgccaccguggaggcccugagaagcggcaugugcugccccgaccugagccccgugagcggccccggcaccgacagaugcggcagcagcagcggcagaggcagaugcgaggccgugaccgccgacagcagaccccacagcccccaguacccccacgacggcagagacgacagagagguguggccccugagauucuucaacagaaccugccacugcaacggcaacuucagcggccacaacugcggcaccugcagacccggcuggagaggcgccgccugcgaccagagagugcugaucgugagaagaaaccugcuggaccugagcaaggaggagaagaaccacuucgugagagcccuggacauggccaagagaaccacccacccccuguucgugaucgccaccagaagaagcgaggagauccugggccccgacggcaacaccccccaguucgagaacaucagcaucuacaacuacuucguguggacccacuacuacagcgugaagaagaccuuccugggcgugggccaggagagcuucggcgagguggacuucagccacgagggccccgccuuccugaccuggcacagauaccaccugcugagacuggagaaggacaugcaggagaugcugcaggagcccagcuucagccugcccuacuggaacuucgccaccggcaagaacgugugcgacaucugcaccgacgaccugaugggcagcagaagcaacuucgacagcacccugaucagccccaacagcguguucagccaguggagaguggugugcgacagccuggaggacuacgacacccugggcacccugugcaacagcaccgaggacggccccaucagaagaaaccccgccggcaacguggccagacccauggugcagagacugcccgagccccaggacguggcccagugccuggaggugggccuguucgacaccccccccuucuacagcaacagcaccaacagcuucagaaacaccguggagggcuacagcgaccccaccggcaaguacgaccccgccgugagaagccugcacaaccuggcccaccuguuccugaacggcaccggcggccagacccaccugagccccaacgaccccaucuucgugcugcugcacaccuucaccgacgccguguucgacgaguggcugagaagauacaacgccgacaucagcaccuucccccuggagaacgcccccaucggccacaacagacaguacaacauggugcccuucuggccccccgugaccaacaccgagauguucgugaccgcccccgacaaccugggcuacaccuacgagauccaguggcccagcagagaguucagcgugcccgagaucaucgccaucgccguggugggcgcccugcugcugguggcccugaucuucggcaccgccagcuaccugaucagagccagaagaagcauggacgaggccaaccagccccugcugaccgaccaguaccagugcuacgccgaggaguacgagaagcugcagaaccccaaccagagcgugguguga

SEQ ID NO: 3018 - RNA, 1560 nt, Artificial Sequence
  AAA20870 variant
augagcccccugugguggggcuuccugcugagcugccugggcugcaagauccugcccggcgcccagggccaguuccccagagugugcaugaccguggacagccuggugaacaaggagugcugccccagacugggcgccgagagcgccaacgugugcggcagccagcagggcagaggccagugcaccgaggugagagccgacaccagacccuggagcggccccuacauccugagaaaccaggacgacagagagcuguggcccagaaaguucuuccacagaaccugcaagugcaccggcaacuucgccggcuacaacugcggcgacugcaaguucggcuggaccggccccaacugcgagagaaagaagccccccgugaucagacagaacauccacagccugagcccccaggagagagagcaguuccugggcgcccuggaccuggccaagaagagagugcaccccgacuacgugaucaccacccagcacuggcugggccugcugggccccaacggcacccagccccaguucgccaacugcagcguguacgacuucuucguguggcugcacuacuacagcgugagagacacccugcugggccccggcagacccuacagagccaucgacuucagccaccagggccccgccuucgugaccuggcacagauaccaccugcugugccuggagagagaccugcagagacugaucggcaacgagagcuucgcccugcccuacuggaacuucgccaccggcagaaacgagugcgacgugugcaccgaccagcuguucggcgccgccagacccgacgaccccacccugaucagcagaaacagcagauucagcagcugggagaccgugugcgacagccuggacgacuacaaccaccuggugacccugugcaacggcaccuacgagggccugcugagaagaaaccagaugggcagaaacagcaugaagcugcccacccugaaggacaucagagacugccugagccugcagaaguucgacaacccccccuucuuccagaacagcaccuucagcuucagaaacgcccuggagggcuucgacaaggccgacggcacccuggacagccaggugaugagccugcacaaccuggugcacagcuuccugaacggcaccaacgcccugccccacagcgccgccaacgaccccaucuucguggugcugcacagcuucaccgacgccaucuucgacgaguggaugaagagauucaacccccccgccgacgccuggccccaggagcuggcccccaucggccacaacagaauguacaacauggugcccuucuucccccccgugaccaacgaggagcuguuccugaccagcgaccagcugggcuacagcuacgccaucgaccugcccgugagcguggaggagacccccggcuggcccaccacccugcugguggugaugggcacccugguggcccuggugggccuguucgugcugcuggccuuccugcaguacagaagacugagaaagggcuacaccccccugauggagacccaccugagcagcaagagauacaccgaggaggccuga

SEQ ID NO: 3019 - RNA, 456 nt, Artificial Sequence
  CCDS7679.1 variant
augagaagacugcugcuggugaccagccuggugguggugcugcugugggaggccggcgccgugcccgcccccaaggugcccaucaagaugcaggugaagcacuggcccagcgagcaggaccccgagaaggccuggggcgccagagugguggagccccccgagaaggacgaccagcugguggugcuguuccccgugcagaagcccaagcugcugaccaccgaggagaagcccagaggccagggcagaggccccauccugcccggcaccaaggccuggauggagaccgaggacacccugggccacgugcugagccccgagcccgaccacgacagccuguaccaccccccccccgaggaggaccagggcgaggagagacccagacugugggugaugcccaaccaccaggugcugcugggccccgaggaggaccaggaccacaucuaccacccccaguga

SEQ ID NO: 3020 - RNA, 525 nt, Artificial Sequence
  ACF47598 variant
auggugagcuacugggacaccggcgugcugcugugcgcccugcugagcugccugcugcugaccggcagcagcagcggcagcaagcugaaggaccccgagcugagccugaagggcacccagcacaucaugcaggccggccagacccugcaccugcagugcagaggcgaggccgcccacaaguggagccugcccgagauggugagcaaggagagcgagagacugagcaucaccaagagcgccugcggcagaaacggcaagcaguucugcagcacccugacccugaacaccgcccaggccaaccacaccggcuucuacagcugcaaguaccuggccgugcccaccagcaagaagaaggagaccgagagcgccaucuacaucuucaucagcgacaccggcagacccuucguggagauguacagcgagauccccgagaucauccacaugaccgagggcagagagcuggugauccccugcagagugaccagccccaacaucaccgugacccugaagaagaagaaggccuga

SEQ ID NO: 3021 - RNA, 750 nt, Artificial Sequence
  BAR92607 variant
augggcagcgacgugagagaccugaacgcccugcugcccgccgugcccagccugggcggcggcggcggcugcgcccugcccgugagcggcgccgcccagugggcccccgugcuggacuucgccccccccggcgccagcgccuacggcagccugggcggccccgcccccccccccgccccccccccccccccccccccccccccccacagcuucaucaagcaggagcccagcuggggcggcgccgagccccacgaggagcagugccugagcgccuucaccgugcacuucagcggccaguucaccggcaccgccggcgccugcagauacggccccuucggcccccccccccccagccaggccagcagcggccaggccagaauguuccccaacgcccccuaccugcccagcugccuggagagccagcccgccaucagaaaccagggcuacagcaccgugaccuucgacggcacccccagcuacggccacacccccagccaccacgccgcccaguuccccaaccacagcuucaagcacgaggaccccaugggccagcagggcagccugggcgagcagcaguacagcgugcccccccccguguacggcugccacacccccaccgacagcugcaccggcagccaggcccugcugcugagaacccccuacagcagcgacaaccuguaccagaugaccagccagcuggagugcaugaccuggaaccagaugaaccugggcgccacccugaagggcuga

SEQ ID NO: 3022 - RNA, 1350 nt, Artificial Sequence
  AAA61299 variant
augggcagcgacgugagagaccugaacgcccugcugcccgccgugcccagccugggcggcggcggcggcugcgcccugcccgugagcggcgccgcccagugggcccccgugcuggacuucgccccccccggcgccagcgccuacggcagccugggcggccccgcccccccccccgccccccccccccccccccccccccccccccacagcuucaucaagcaggagcccagcuggggcggcgccgagccccacgaggagcagugccugagcgccuucaccgugcacuucagcggccaguucaccggcaccgccggcgccugcagauacggccccuucggcccccccccccccagccaggccagcagcggccaggccagaauguuccccaacgcccccuaccugcccagcugccuggagagccagcccgccaucagaaaccagggcuacagcaccgugaccuucgacggcacccccagcuacggccacacccccagccaccacgccgcccaguuccccaaccacagcuucaagcacgaggaccccaugggccagcagggcagccugggcgagcagcaguacagcgugcccccccccguguacggcugccacacccccaccgacagcugcaccggcagccaggcccugcugcugagaacccccuacagcagcgacaaccuguaccagaugaccagccagcuggagugcaugaccuggaaccagaugaaccugggcgccacccugaagggcguggccgccggcagcagcagcagcgugaaguggaccgagggccagagcaaccacagcaccggcuacgagagcgacaaccacaccacccccauccugugcggcgcccaguacagaauccacacccacggcguguucagaggcauccaggacgugagaagagugcccggcguggcccccacccuggugagaagcgccagcgagaccagcgagaagagacccuucaugugcgccuaccccggcugcaacaagagauacuucaagcugagccaccugcagaugcacagcagaaagcacaccggcgagaagcccuaccagugcgacuucaaggacugcgagagaagauucagcagaagcgaccagcugaagagacaccagagaagacacaccggcgugaagcccuuccagugcaagaccugccagagaaaguucagcagaagcgaccaccugaagacccacaccagaacccacaccggcaagaccagcgagaagcccuucagcugcagauggcccagcugccagaagaaguucgccagaagcgacgagcuggugagacaccacaacaugcaccagagaaacaugaccaagcugcagcuggcccuguga

SEQ ID NO: 3023 - RNA, 279 nt, Artificial Sequence
  AAA63269 variant
augcagagaagaggccagccccuggagaaccacguggcccugauccacuggcagagcgccggcauccccgccagcaaggugcacaacuacugcaacaugaagaagagcagacugggcagaagcagagccgugagaaucagccagccccugcugagccccagaagaugcccccugcaccugaccgagagaggcgccggccugcugcagccccagccccagggccccgugagaacccccggcccccccagcggcagccaccccgccgccgccgacaacuga

SEQ ID NO: 3024 - RNA, 246 nt, Artificial Sequence
  AAP35763 variant
auggagagccccaagaagaagaaccagcagcugaaggugggcauccugcaccugggcagcagacagaagaagaucagaauccagcugagaagccagugcgccaccuggaaggugaucugcaagagcugcaucagccagacccccggcaucaaccuggaccugggcagcggcgugaaggugaagaucauccccaaggaggagcacugcaagaugcccgaggccggcgaggagcagccccagguguga

SEQ ID NO: 3025 - RNA, 1098 nt, Artificial Sequence
  AAA59652 variant
auggccgugauggcucccagaacccugcuccugcuucugagcggcgcccucgcgcugacacagacgugggcugggucccacucuaugcgguacuucuuuaccagcgucucccgcccuggaagaggcgagccgcgguucaucgccguuggguauguggacgauacacaauuugugcgcuucgacucugaugccgcuagccagaagauggaacccagagccccuuggauugagcaggaaggacccgaguacugggaccaggaaacccggaacaugaaagcucauucccaaacagaucgcgccaaucuuggcacccugagaggguauuacaaccagucugaggacggaagccacacaauccagauuauguauggcugcgaugucggcccugacgggcgguuucuccgcggauacagacaggaugcguaugacggcaaggauuacaucgcccugaaugaggaccugcgguccuggaccgcugccgauauggcugcccaaauuacgaaacgcaagugggaagcggugcaugccgcugagcagagacggguuuaccucgaagggcgcuguguggacggacugagacgguaucuugagaacggcaaagagacccugcagagaacagaucccccuaagacccacaugacacaucacccgaucagcgaccacgaagccacccuccgcugcugggcucugggguucuaccccgccgagaucacgcuuacauggcagcgggacggagaagaucaaacccaggacacagagcuggucgaaaccagaccugccggcgauggcaccuuucagaagugggcugcggugguugugcccucuggggaggagcaacgcuauacaugucauguccagcacgaaggacucccuaaaccccugacgcugcggugggagcucuccagccagccgaccauuccuaucgugggcauuaucgccgggcuggugcuucugggagcugucauuacaggcgccguuguggccgcugugauguggagacgcaagucuuccgaccggaaagggggaagcuacacccaggccgcgucuuccgauagcgcucaaggcuccgacgucucucucacagccugcaagguguga

SEQ ID NO: 3026 - RNA, 1098 nt, Artificial Sequence
  AAA59606 variant
auggccgugauggcucccagaacccugguccuccugcuuagcggcgcccuggcgcucacacagacgugggcugggucccacucuaugcgguacuucuuuaccagcguuucccgcccuggaagaggcgagccgcgguucaucgccgugggguauguggacgauacacaauuuguccgcuucgacucugaugccgcuagccagagaauggaaccccgggccccuuggauugagcaggaaggacccgaguacugggacggcgaaacccgcaaggugaaagcucauucccagacacacagaguugaucuggggacccuucggggauauuacaaccaaucugaggccggcagccauacagugcagcgcauguauggcugcgacgucggguccgauuggagauuucugcggggauaccaccaguaugcguacgacggcaaggauuacaucgcccucaaagaggaccugcgcagcuggaccgcugccgauauggcugcccagacgaccaagcauaaaugggaagcggcccacguggcugagcaacugagagccuaucucgaagggacauguguugaguggcugcggcgcuaccuugagaauggaaaggaaacccugcagagaacagacgcuccuaagacccacaugacgcaucacgccgugucugaucaugaggccacacuccggugcugggcucuguccuucuaucccgcggaaauuacccuuacauggcagagagacggcgaggaccagacccaagauaccgaacuggucgagacacgcccugccggggacggaacguuucagaaaugggcugccgugguggucccgagcggccaggagcaacgguacaccugucacguucagcacgaaggccuccccaagccucugacacugagaugggagcccucuucccagccuaccauccccauuguggggaucaucgccggacucgugcuguucggcgcugucauuacaggggccgugguugcggcugugauguggcgccggaaaagcucugauagaaagggaggcuccuauagccaggccgccuccucugacagcgcucaaggguccgaugucagccuuaccgccugcaaaguguga

SEQ ID NO: 3027 - RNA, 1263 nt, Artificial Sequence
  AAH37161 variant
augcccggcgggugcagcagaggaccugccgcuggcgacgggcggcugcgccucgccagacuggcgcuugugcugcucggaugggucuccucuagcuccccgaccucuagcgcuuccucuuucagcuccagcgcccccuuucuggccucugcuguuuccgcccagccuccccuuccugaucaaugucccgcucugugcgaguguagcgaagccgcgcggacagugaagugcgugaaccgcaaucucacggaggucccuaccgaccugccggccuacgugagaaaccuguuccucacaggcaaucagcuggcuguucuucccgccggggcuuuugcccggcgcccuccccuggcggaacucgccgcucugaaccuuucuggauccagacuggaugaggugcgggccggcgcuuucgaacaccucccuagccugcgccagcuggaccucucucauaauccccuggccgaucuuuccccguuugccuucagcggcuccaacgcuucugucagcgcgccuagcccccugguggagcucauccugaaucacauuguuccucccgaggacgaaagacagaaccgguccuuugaggggaugguggucgccgcccuucuggcuggacgcgcccuccaaggccugagacggcuggaacucgcuucuaaucauuuccuguaucuuccccgcgaugugcuggcccagcucccuucccugagacaccuugaccugagcaacaauucucucgugagccugaccuacgucuccuuucggaaccugacacaucucgagucucugcaccuugaggauaaugcgcugaaaguucuccacaacgggacccuggcugaacugcagggacuuccgcauaucagaguguuccucgacaauaaccccugggugugugauugccacauggccgacauggucacauggcugaaggagaccgaagugguucagggcaaagaucgccugacgugugccuauccugagaagaugcggaacagagugcuccuggaacuuaauagcgcugaccuggacugcgaucccauucucccucccucccugcaaaccagcuacgucuuucuggggaucgugcuugcccucauuggagcuaucuuccugcugguucucuaucugaaccgcaaaggcaucaagaaguggaugcauaauauucgggacgccuguagagaucacauggagggcuaccacuaucgcuacgagaucaacgcggacccgcggcuuacaaaucugucuuccaacagcgauguguga

SEQ ID NO: 3028 - RNA, 1632 nt, Artificial Sequence
  AAH33010 variant
augagaaagcccgccgcuggcuuccugccuagccuccugaaagugcuucugcucccgcuggcccccgcggcugcccaggacuccacccaagccucuacaccugggagcccccuuuccccuacggaguacgaacgguuuuucgcucugcucacccccacauggaaggccgagaccacaugccgccugagagcuacccacggaugucggaacccuacacugguccagcucgaucaguaugaaaaucauggccugguuccggacggggccgugugcucuaaccuucccuacgcgagcugguuugaguccuucugucaguuuacccacuaucgcugcucuaaucauguguacuaugccaaaagaguccuguguagccaaccuguguccauccucagccccaacacgcugaaggaaauugaggcuucugccgagguuuccccuaccacaaugaccagccccaucucuccgcacuucacagugaccgaacggcagacguuucagccuuggcccgagcgccuuuccaauaacgucgaagaacugcuccagagcucucugucccugggaggccaagagcaggcuccugaacauaaacaggagcaggggguggaacacagacaagagcccacacaggaacacaagcaggaggagggacaaaagcaggaggagcaggaagaggaacaggaggaggaaggcaaacaagaggaaggccaggggaccaaggagggacgggaagccguuagccagcuccagacagauuccgagcccaaauuccauucugagagccuguccagcaauccuucuuccuuugcgccgcgcgugagagaagucgagagcacccccaugauuauggaaaacauccaagagcuuauucggucugcccaggagaucgacgaaaugaaugagaucuacgaugaaaacagcuauuggcgcaaucagaacccuggcucccugcuccagcugccccacaccgaggcccuucuggugcucugcuacucuauuguggaaaauacauguaucauuacgccuaccgcuaaggcuuggaaauacauggaggaggaaauccugggguucggaaagagcgucugcgacucccugggcagacggcauaugagcacaugugcccucugcgauuuuuguucucugaaacuugagcaaugccacuccgaagccagccugcagcgccagcagugcgacaccucucacaagacacccuucguuuccccgcuccuggcuagccaaucccuuucuauugggaaccaggugggaagcccugaguccggcagauuuuauggccuggaucucuacgggggacugcauauggacuucuggugugcgcggcuggccaccaagggcugcgaagaugugagagucucuggguggcuccagacggaguuccugagcuuucaagacggagauuuccccacaaaaaucugugacaccgacuauauucaguacccuaauuauugcuccuuuaagagccagcagugucuuaugcgcaaccggaacagaaaagugucucgcaugcggugccugcaaaaugagaccuacuccgcucucagccccggcaagucugaagauguugugcugagauggucccaggaguucagcacacugacccuugggcaguuuggauga

SEQ ID NO: 3029 - RNA, 1830 nt, Artificial Sequence
  AAB58754 variant
augaaguggguggagagcaucuuccugauuuuucuccugaacuucaccgaauccagaacacuucaccggaaugaguacggcaucgccucuauucuggacagcuaucagugcacggcugaaaucucccucgccgaucuggcgaccauuuucuucgcucaauuuguccaggaggccacauacaaagaaguuucuaagauggugaaagacgcccuuaccgcuaucgagaagcccacaggggaugagcagagcuccggaugucuggaaaaccagcucccugccuuccuggaggaacugugccaugagaaagagauccucgaaaaguauggccacucugacuguugcagccaauccgaggaagggcgccauaauuguuuucuggcucacaagaaaccgacccccgccagcauuccucuuuuccaggugcccgagccugucacaucuugcgaagcguacgaggaggauagagaaaccuuuaugaacaaguucaucuaugagauugcccggcgccaucccuuucuguacgcuccuacgauccuccugugggccgcuagauaugacaaaauuaucccguccuguugcaaggccgaaaaugcgguggaguguuuccagaccaaagccgcuacaguuaccaaggaacuucgggagagcucucugcucaaccagcacgccugcgcugugaugaagaauuuuggaacacgcaccuuccaagccauuacggucacaaaacugucccagaaguucaccaaagugaacuuuacagagauccagaagcugguucucgauguggcccacguccaugaacacuguugcagaggcgacgugcuggauugccuucaggacggggagaaaaucaugagcuacauuuguucucaacaggauacccuguccaauaagaucaccgaaugcuguaaacucacaacgcuggagcggggacagugcauuauccaugcugaaaacgacgagaagcccgagggccuuagcccuaaucugaaccgcuuccucggcgauagagacuuuaaucaauucuccucuggggaaaagaacauuuuucuggcgagcuucgugcacgaguacucccggcgccacccccagcuggccgucagcguuauccucagaguggcuaaaggauaucaggaacugcuugagaaguguuuucagaccgagaauccucuggaaugccaagacaaaggcgaggaggaacuccagaaguacauccaggaaucucaggcccuggccaaacgguccugugggcuuuuccaaaagcugggagaguauuaccuccagaacgcuuuucugguggccuauacaaagaaagcgccccagcugaccagcucugagcucauggcuauuacacgcaagauggccgccaccgcugccacgugcugucagcugagcgaagauaaacuucuggcuugcggcgagggggccgcggacaucauuaucggacaucucuguauuagacacgaaaugacaccggucaacccuggcgugggccaaugcugcaccuccucuuacgccaaucggagacccuguuucagcucccugguuguggaugagaccuaugucccucccgcuuuuagcgacgauaaguucaucuuucauaaagaccugugccaggcccaggggguggcccuucagacaaugaagcaagaauuucucaucaaccugguuaagcagaaaccccagauuaccgaggagcaacuggaagcugugaucgcggauuucucuggacuccuggagaaguguugccagggccaggaacaggaggucuguuuugccgaagaggggcaaaaacuuauuuccaagacacgcgcugcccugggaguguga

SEQ ID NO: 3030 - RNA, 2565 nt, Artificial Sequence
  AAI26251 variant
augauggccuacagcgacaccacaaugauguccgaugacaucgauuggcugagaucucaccggggcgugugcaaggucgaccucuauaaccccgaggggcagcaagaucaggaccgcaaaguuauuuguuucguggaugugagcacgcugaaugucgaagacaaggauuacaaagacgcugccuccucuagcuccgagggaaaccuuaaucugggcucucucgaagagaaggaaaucauugugaucaaagauaccgagaagaaggaccagagcaaaacagagggguccguuugccuguuuaagcaggcgccuagcgauccggugucuguccuuaacuggcugcucuccgaccugcaaaaauaugcucugggauuccagcaugcccucagccccucuaccuccacauguaagcacaaagugggcgacaccgaaggggaguaccauagagccagcucugaaaauugcuauuccguuuacgcugaucaggugaacauugacuaucugaugaaucggccucagaaccuucgccuggagaugacagccgcuaagaauaccaacaauaaccaaagccccuccgccccucccgcgaagccuccgucuacgcagagagccgucaucagccccgauggagaguguuccaucgacgaucucagcuuuuacgugaaucggcugucuucccuugugauucagauggcucacaaagaaaucaaggagaaacuggaaggcaagagcaaaugccuccaucacucuauuuguccuagccccggcaacaaggagcgcaucuccccuagaacccccgccucuaaaauugcuagcgaaauggccuacgaggcggucgagcugacagccgcugaaaugcgggggaccggagaggaaucccgcgagggcgggcagaagucuuuccuguauucugaacucuccaauaagagcaaaucuggagacaagcaaaugucccagagagagagcaaagaguuugccgauuccaucucuaagggccugaugguuuacgcuaaccagguggccagcgacaugauggugucccuuaugaaaacacugaagguccacucuagcgggaagccgauuccugccuccgugguucucaaacgggugcugcuucgccauaccaaggaaaucgucagcgaucugaucgacucuugcaugaaaaaccuccacaauauuacgggagugcugaugacagauuccgacuucguuagcgcugugaagagaaaccuguuuaaucaauggaaacagaacgcgaccgacaucauggaggccaugcucaagcggcuggucucugcucuuauuggcgaagagaaggaaacaaaaucccagagccugucuuaugccagccucaaggccggcucccaugaucccaaaugucgcaaucagagccuggaguucucuaccaugaaggcugagaugaaagaaagagacaaggggaagaugaaauccgauccuugcaagagccuuaccuccgccgagaaagugggagaacacauccugaaggagggccucacaauuuggaaccaaaaacaggggaauagcuguaaggucgcgacgaaggcuugcagcaacaaagacgagaagggagagaaaaucaaugccuccaccgauucucuggccaaggaccugaucgugagcgcucucaaacugauucaguaccaccuuacacagcaaaccaagggcaaagauacaugcgaggaagacugucccggguccaccaugggauauauggcccagucuacgcaguacgagaagugcggcggcgggcagagcgcuaaggcccuguccguuaaacaacucgaaagccaucgggcgcccggaccuucuacaugucagaaggagaaccagcaccuggauucccagaaaauggacaugagcaauaucgugcugaugcuuauucaaaagcuccugaacgagaauccguuuaaaugcgaagaucccugugagggcgaaaacaagugcucugagccuagagccuccaaggcugccagcaugucuaaucgcuccgacaaagcugaagaacagugucaggagcaucaagaacuggauugcaccagcgggaugaagcaggccaacggacaguucaucgacaaacucgucgaguccgugaugaagcugugucuuauuauggcgaaauauagcaacgacggcgccgcucuggccgaacucgaggaacaggcugccucugccaauaagcccaacuuucgggggaccagaugcauccacagcggcgcuaugccucaaaauuaccaggauucccugggacaugagguuaucgugaacaaucaguguucuacaaacagccugcagaagcaacuucaggcgguccuccaguggauugccgcuucccaguucaaugugcccaugcuguacuuuaugggcgacaaagaugggcaacuggagaagcucccucaggugucugccaaagccgcugaaaagggauauagcguuggcgggcugcuucaggaggucaugaaauucgccaaggaacgccaaccggacgaggcggugggaaaaguggcucggaagcagcugcucgauuggcugcuggccaaccuuuga

SEQ ID NO: 3031 - RNA, 1251 nt, Artificial Sequence
  BAG61782 variant
augguggacuaccacgccgcuaaccagagcuaucaauacggccccuccucugccgggaauggagcgggcgggggaggcagcaugggggauuauauggcucaggaggacgauugggacagagaucugcuccuggacccugccugggaaaagcagcagcggaaaaccuucacagccuggugcaacucccaucuucgcaaggcuggaacgcaaaucgagaauauugaugaagacuuuagagauggccugaaacucaugcugcuucuggaggucaucucuggcgaacggcucccgaagcccgagcgcgggaaaaugagaguucacaagauuaacaaugugaacaaggcccuggacuucaucgcuagcaaaggagugaagcuggucuccauuggcgccgaggaaaucguggaugggaaugcgaaaaugacccucggaaugaucuggacaauuauccugcgguuugccauucaggacaucucuguugaggaaaccagcgcuaaggagggccuucugcucuggugucagcgcaaaacagccccuuacaagaacgugaauguccagaacuuccauauuuccuggaaggaugggcuggcuuuuaaugcccuuauccacagacaucggcccgagcugauugaauaugacaaacuccgcaaggacgauccugugaccaaccugaauaacgcguucgagguugccgaaaaauaccuggacauccccaagaugcucgaugcugaggacaucgugaauacagccagaccugaugaaaaagcuauuaugaccuaugucagcucuuuuuaccacgccuucuccggagcccaaaaggcugagacggcggccaaccggaucugcaaagugcuggcugugaaccaggagaaugaacaccuuauggaggacuacgaaaagcuggccagcgaucuccuggaguggauucgcagaaccaucccguggcuugaagaccgggucccccagaagacaauucaggagaugcaacagaaacuggaggauuuucgcgacuauagacggguucauaagccucccaaagugcaggaaaagugucaacucgagaucaacuucaauacccugcagacaaaacugagacucucuaaccgcccugccuuuaugcccuccuggcggagcagagcuucuuccagcccgaccuccacgugcgccgcgucuagcccugcucgccccaugcuguggggcccuggcucccggcccagauggcgccggagcggggccucuccccuuagauga

SEQ ID NO: 3032 - RNA, 1689 nt, Artificial Sequence
  BAG65349 variant
augguggacuaccacgccgcuaaccagagcuaucaauacggccccuccucugccgggaauggagcgggcgggggaggcagcaugggggauuauauggcucaggaggacgauugggacagagaucugcuccuggacccugccugggaaaagcagcagcggaaaaccuucacagccuggugcaacucccaucuucgcaaggcuggaacgcaaaucgagaauauugaugaagacuuuagagauggccugaaacucaugcugcuucuggaggucaucucuggcgaacggcucccgaagcccgagcgcgggaaaaugagaguucacaagauuaacaaugugaacaaggcccuggacuucaucgcuagcaaaggagugaagcuggucuccauuggcgccgaggaaaucguggaugggaaugcgaaaaugacccucggaaugaucuggacaauuauccugcgguuugccauucaggacaucucuguugaggaaaccagcgcuaaggagggccuucugcucuggugucagcgcaaaacagccccuuacaagaacgugaauguccagaacuuccauauuuccuggaaggaugggcuggcuuuuaaugcccuuauccacagacaucggcccgagcugauugaauaugacaaacuccgcaaggacgauccugugaccaaccugaauaacgcguucgagguugccgaaaaauaccuggacauccccaagaugcucgaugcugaggacaucgugaauacagccagaccugaugaaaaagcuauuaugaccuaugucagcucuuuuuaccacgccuucuccggagcccaaaaggcugagacggcggccaaccggaucugcaaagugcuggcugugaaccaggagaaugaacaccuuauggaggacuacgaaaagcuggccagcgaucuccuggaguggauucagcgcaccaucccguggcuugaagacagagucccccagaaggccauucaagagaugcagcagaaacuggaggauuuucgggacuaucgcagaguucauaagccucccaaagugcaagaaaagugucagcucgagaucaacuucaauacacugcagaccaaacugcggcucucuaacagaccugcuuuuaugcccuccgaaggcaagauggugagcgauaucaauaacggcuggcagcaccuggagcaagccgaaaagggguacgaggaguggcuucugaaugaaauucgccggcucgagagacuggaccaucuugcggaaaaauuccgccagaaggcuucuauccacgaggccuggacagacggaaaagaggccaugcugaagcaccgggauuaugaaaccgcuacgcucuccgacauuaaagcccugaucagaaagcaugaggcuuuugaaagcgaucuggccgcgcaccaggaccgcgucgagcagauugccgcuaucgcccaagaacucaacgagcuggauuacuaugacucccauaaugugaacacaccggauggccuucaggaggggccuggacagccccacucuccuaucccuccccugugcauuuacgcuaagcauagccuccaguccagcggcguugggggaugggccggccggggcugggggagacugucuccccugucccuuuguggacucgcgcgccgguucccgagacccggcuggggagaccuggggccugcccugcucgugugguga

SEQ ID NO: 3033 - RNA, 2736 nt, Artificial Sequence
  AAH05033 variant
augguggacuaccacgccgcuaaccagagcuaucaauacggccccuccucugccgggaauggagcgggcgggggaggcagcaugggggauuauauggcucaggaggacgauugggacagagaucugcuccuggacccugccugggaaaagcagcagcggaaaaccuucacagccuggugcaacucccaucuucgcaaggcuggaacgcaaaucgagaauauugaugaagacuuuagagauggccugaaacucaugcugcuucuggaggucaucucuggcgaacggcucccgaagcccgagcgcgggaaaaugagaguucacaagauuaacaaugugaacaaggcccuggacuucaucgcuagcaaaggagugaagcuggucuccauuggcgccgaggaaaucguggaugggaaugcgaaaaugacccucggaaugaucuggacaauuauccugcgguuugccauucaggacaucucuguugaggaaaccagcgcuaaggagggccuucugcucuggugucagcgcaaaacagccccuuacaagaacgugaauguccagaacuuccauauuuccuggaaggaugggcuggcuuuuaaugcccuuauccacagacaucggcccgagcugauugaauaugacaaacuccgcaaggacgauccugugaccaaccugaauaacgcguucgagguugccgaaaaauaccuggacauccccaagaugcucgaugcugaggacaucgugaauacagccagaccugaugaaaaagcuauuaugaccuaugucagcucuuuuuaccacgccuucuccggagcccaaaaggcugagacggcggccaaccggaucugcaaagugcuggcugugaaccaggagaaugaacaccuuauggaggacuacgaaaagcuggccagcgaucuccuggaguggauucgcagaaccaucccguggcuugaagaccgggucccccagaagacaauucaggagaugcaacagaaacuggaggauuuucgcgacuauagacggguucauaagccucccaaagugcaggaaaagugucaacucgagaucaacuucaauacccugcagacaaaacugagacucucuaaccgcccugccuuuaugcccuccgaaggcaagauggugagcgauaucaauaacggcuggcagcaccuggagcaggcugaaaagggguacgaggaguggcuucugaaugaaauucggagacucgagcgccuggaccaucuugccgaaaaauuccggcaaaaggcgucuauccacgaggcuuggaccgacggaaaagaggccaugcugaagcacagagauuaugaaacggccacacucuccgacauuaaagcucugauccgcaagcaugaggccuuugaaagcgaucuggcugcccaccaggaccgggucgagcagauugcggccaucgcucaggaacucaacgagcuggauuacuaugacucccauaaugugaacaccagaugccaaaagaucugugaucagugggacgcccuuggcucucugacacacagccgccgggaggcucucgagaaaaccgagaagcagcuggaagccauugaucagcugcaucuugaguacgcgaaaagagccgcuccguucaauaacuggauggaauccgccauggaggaccuccaagauauguucaucguucacaccauugaggaaaucgaggggcugauuagcgcucacgaccaguuuaagucuacacugccugaugccgaccgcgaacgggaggccauccucgcuauucauaaagaagcgcagagaaucgccgaguccaaucacaucaagcugagcggaucuaaccccuauacgaccgugacaccucagauuaucaauagcaagugggagaaaguccaacagcuugugcccaagcgggaccaugcucugcucgaagaacaguccaaacaacagucuaacgaacaucugcgcagacaguucgccagccaggccaacguugugggccccuggauucaaaccaagauggaggagaucgggcggauuuccaucgaaaugaauggaacacuggaggaucagcuuagccaccucaaacaguacgaaagaucuaucgucgacuacaagccuaaccuggaucugcucgagcagcaacaccagcugauucaggaagcucuuaucuuugacaauaaacacaccaacuauacgauggagcauauucgcgugggcugggagcagcugcucacaaccaucgcccggaccauuaaugaagucgagaaccaaauccugacaagagaugcgaagggcaucucccaggaacagaugcaagaguuccgcgcuagcuuuaaucacuucgacaaggaucaugggggagcccugggcccggaagaguuuaaagccugccuuauuucucucggguacgacguggagaacgauagacagggagaagcugaguucaaucggaucaugucccugguugaccccaaccacagcggccuggugaccuuucaggccuucauugauuuuaugucccgcgaaacaacggacaccgauacagcggaccaggucaucgcuucuuucaaggugcucgccggggacaaaaauuuuauuaccgccgaggaacugagacgggagcuuccucccgaucaagcugaguauuguaucgcccgcauggcuccuuaccagggccccgacgccguuccgggagcgcuggauuauaagagcuucuccacagcccucuacggcgaaucugaccuguga

SEQ ID NO: 3034 - RNA, 597 nt, Artificial Sequence
  EAX10817 variant
auggcccugcagggcaucagcgugauggagcucuccgggcuggcucccggaccuuucugcgccaugguccuugcggacuuuggcgcuagaguugugcggguggaucgcccggggucuagauacgacgucagccggcugggacgcggcaagagaucccucgugcuggaucuuaaacaaccccgcggggccgccguucugcggagacucuguaagcggucugacgugcugcuggaaccuuuccgcagaggagucauggagaaacuccagcugggccccgaaauucuucagcgggagaacccucgccugaucuaugcuagacucagcggcuuugggcaguccggaucuuucugccggcuggccggccacgauauuaauuaccuugcucugagcgggggacgcaacuccaucuuuaaguucuuuagcguggaaaauucugagauugaguccguuggcagcaccucuagaacagaacaugugggguggugguccacguuccucuaugaccugcaagauagccgguggggaauccacggcuguuggucuaacagaacccccguccugcgcgccgcggaccagcggacauggaccaaaguguga

SEQ ID NO: 3035 - RNA, 597 nt, Artificial Sequence
  BAF85677 variant
auggcccugcagggcaucagcguggucgagcucuccgggcuggcucccggaccuuucugcgccaugguucuugcggacuuuggcgcuagaguggugcgggucgaucgcccggggucuagauacgacgugagccggcugggacgcggcaagagaucccucguucuggaucuuaaacaaccccgcggggccgccgugcugcggagacucuguaagcggucugacguccugcuggaaccuuuccgcagaggagugauggagaaacuccagcugggccccgaaauucuucagcgggagaacccucgccugaucuaugcuagacucagcggcuuugggcaguccggaucuuucugccggcuggccggccacgauauuaauuaccuugcucugagcgggggacgcaacuccaucuuuaaguucuuuagcguugaaaauucugagauugaguccgugggcagcaccucuagaacagaacaugucggguggugguccacguuccucuaugaccugcaagauagccgguggggaauccacggcuguuggucuaacagaacccccuuucugcgcgccgcggaccagcggacauggaccaaaguguga

SEQ ID NO: 3036 - RNA, 2763 nt, Artificial Sequence
  EAX05380 variant
auggaggugcagcugggccucgggagagucuacccccggccuccgagcaagaccuaucgcggagccuuccaaaaccuguuucaguccguuagagaagugauccagaaucccggcccucggcaccccgaggcugccucugcggcuccucccggggccagccuucugcuccugcagcaacagcagcagcaacagcagcagcaacagcagcaacagcagcagcaacagcagcagcaacagcaggaaacauccccucgccagcaacagcagcagcaaggagaggacggcucuccgcaggcccauagacgggggcccacgggauaccuugugcuggaugaggaacagcaaccuagccagccccaguccgcucucgagugccacccugaacgcggcuguguccccgagccgggcgccgcuguggccgcgucuaaagggcugccucagcaacugcccgccccucccgacgaagaugacagcgcugcccccuccacccucagccugcuuggaccuacauucccgggccugucuuccugcagcgcugaucucaaggacauucugucugaggccuccaccaugcagcuucugcagcagcaacagcaggaggcgguuagcgaagggucuuccagcggcagagcccgggaggcuuccggagcccccacaucuagcaaagauaacuaucucgggggaaccuccacaaucagcgacaaugcuaaggaacuguguaaagccgugucugucuccaugggccugggcguggaggcccucgaacaucugagcccuggggagcagcuucgcggagauugcauguacgcuccccugcucggcguuccucccgcggugagaccgaccccuugugcuccccuggcugagugcaaggggucucuucuggacgauagcgccggaaaguccacggaagacaccgccgaguauucuccuuuuaaaggcggguacacaaagggacucgaaggcgagagccugggcuguuccgggagcgcugccgcgggaucuuccggcacccuggaacuccccagcacacugucucuuuauaaauccggggcucuggaugaggccgccgcuuaccaaagccgggacuacuauaacuucccucucgcccuggcuggacccccgccucccccucccccgccccacccucaugcccgcauuaaacuugagaauccccuggacuacggcuccgcgugggccgcugccgcugcccagugcagauauggggaucucgcgucucugcacggcgccggagcugccggcccugggagcggaucccccucugcugccgccagcuccagcuggcacacccuguuuacggcugaagagggccagcucuacgggccuuguggaggcgggggcggaggcgggggaggcgggggaggcgggggcggaggcgggggaggcgggggaggcggggaagcgggcgccgucgcucccuauggauacacacggccgccucaaggccuggccgggcaggagucugacuucaccgcccccgaugugugguauccuggaggcauggugucccgcguccccuacccgagcccuacaugcguuaaaucugaaauggggcccuggauggacuccuacagcggaccuuauggcgauaugagacuugagaccgcucgggaccaugugcugcccaucgauuacuauuuucccccucagaagaccugucucauuugcggcgacgaggccucugggugccacuacggagcgcugacauguggcagcugcaagguguucuuuaaaagagcugccgaagggaagcagaaauaucugugugccucccgcaacgauugcacgaucgacaaguuccggagaaagaauuguccgagcugccgccuucggaaguguuacgaggcuggaaugacccucggcgccagaaaacugaagaagcuggggaaccucaaacugcaagaagagggagaggcgucuuccacaaccagccccacagaagagaccacgcagaaacuuacagucucccauaucgaaggcuaugagugccagccuauuuuucugaaugugcucgaagcuaucgagcccggcguugugugugccgggcacgauaacaaucagccugacucuuucgccgcucugcugagcucccuuaacgagcucggagaacgccaacugguccacgugguuaagugggccaaggcucugcccggcuuucggaaucuccauguggacgaucagauggccgucauucaguacucuuggauggggcugaugguguucgcgaugggauggcgcagcuucaccaacgucaauuccagaaugcuuuacuuugccccugaccugguguucaacgaguaucggaugcacaaaucuagaauguacagccagugcguucgcaugcggcaucucucccaagaauuuggcuggcugcagaucaccccgcaggaguuccuguguaugaaggcccuucuccuguuuagcauuauccccguggaugggcugaagaaccagaaauucuuugacgaacucagaaugaauuauauuaaggagcuggaucggaucaucgccugcaaacgcaagaacccuacaucuugcuccagacgguucuaccaacuuaccaaacugcucgacagcguccagcccauugcuagagagcugcaccaguuuacauucgaucugcuuaucaagucucauaugguguccguugacuuuccugaaaugauggccgagauuaucagcgugcaaguccccaagauucucucuggaaaagugaagccgaucuauuuccacacgcaguga

SEQ ID NO: 3037 - RNA, 1239 nt, Artificial Sequence
  AAH64630 variant
auggcccccguggagcacgucguugcugacgccggcgcguuccugagacaugcugcccuccaggauaucgggaagaacauuuacaccauccgggaaguggugacagagauucgcgacaaagccacgagacggcgccuggcuguccuuccuuaugaacugagauuuaaggagccgcuccccgaauacgugcggcugguuaccgaguucagcaaaaagacaggagauuauccuucccuuucugccaccgacauccaagugcuggcucucacauaccagcuggaggccgaauuugucggcgugagccaccugaaacaggagccccagaagguuaagguguccucuagcauucaacauccugaaacaccccuccacaucuccggguuccaucugccuuauaaaccgaagcccccucaggagaccgagaaaggacacucugcgugcgaacccgagaaucuugaauuuagcuccuucauguuuuggcgcaacccucugcccaauaucgaucacgagcuccaggaacugcuuauugacagaggcgaggaugucccgagcgaggaagaggaagaggaagagaacggguucgaggaccggaaggaugacucugaugacgauggaggcggcuggaucaccccuuccaauauuaaacagauccaacaggaacuggagcagugugacgugcccgaagacgugcgcgucgggugccucacgaccgauuuugccaugcagaacguucugcugcaaaugggacuccaugugcuggcugugaauggcaugcuuauuagagaggcccggagcuacauccugcgcugucacgggugcuucaagacaaccucugacauguccagagucuuuuguagccauugcggaaacaagacacucaaaaaggugucuguuaccguguccgaugacggcacgcugcacaugcacuucagccggaauccuaaaguccuuaacccccgcgggcugagauauucccuccccacaccuaagggaggcaaauacgcuauuaauccgcaucugaccgaagaucagcgguuuccccagcugagacucucucaaaaggcccgccagaaaacaaacguguucgcgccugacuacaucgccggcguuagccccuucguggagaaugauaucuccagccggucugcuacccugcaggucagagacuccacccuuggggccggacgccggagacugaacccuaaugcuagccgcaagaaguuugugaaaaagcgguga

SEQ ID NO: 3038 - RNA, 984 nt, Artificial Sequence
  AAH69102 variant
augcagaugcccgccaugaugagccugcuccugguguccgucggccuuauggaggcucugcaagcccagucucacccuaucaccagacgggaccucuucagccaggaaauucagcuggauauggcgcuugcuuccuuugacgaucaauacgccgggugcgccgcugccaugacagcugcccugccggaccucaaccauacggaguuccaggcgaaucagguuuaugccgauucuuggacccuggcuagcucccaguggcaagaacgccaggccagauggcccgaguggucucugagcccuacacggcccuccccucccccucucggauuucgcgacgaacacggcguggcucugcuugccuacaccgcgaacagcccgcugcauaaggaguucaaugccgcugugagagaggccgggcggucucgcgcucacuaucuccaucacuuuuccuucaaaacacugcacuuucuucugaccgaagcccuccagcugcugggaagcggccagagacccccucggugucaucaagucuuccgcggggugcacggacucagauuucggcccgccggcccucgcgcuacaguuagacugggcggguucgcgucugccucccuuaagcauguggcugcccagcaguuuggagaggauaccuucuuuggcaucuggacgugccugggggcccccauuaaaggauacagcuucuucccgggcgaagaggagguccucaucccucccuuugaaaccuuccaagugauuaacgcuucucggcuggcccaggggccugcgcgcaucuaucuuagagcucugggaaagcacuccacauacaauugugaguauaucaaagacaagaagugcaaaagcggccccugucaccucgauaacuccgccaugggccagucuccccugagcgccguuuggucccugcuccugcuucugugguuucucgugguccgggcuuucccugacgggccgggacugcuuuga

SEQ ID NO: 3039 - RNA, 1035 nt, Artificial Sequence
  AAH09751 variant
auggcccagaaggagaacagcuaccccuggccuuauggcagacaaaccgcuccguccgggcugucuacacucccccagcgggugcugcgcaaagaaccugucacgcccagcgcccuuguucugauguccagaucuaaugugcagccuaccgcggcucccggacagaaggugauggagaacagcuccggcacaccugacauccucacccggcacuucacaauugaugacuuugaaaucgggcgcccgcugggaaaaggcaaguucgggaaugucuaccuugccagagagaaaaagucucauuuuauuguggcccugaagguucucuucaaaagccaaaucgaaaaggagggaguggagcaccagcugcggcgcgaaauugagauccaggcucaucugcaccaucccaacauccucagacuguauaauuacuuuuaugaucggcgcagaauuuaccuuauccuggaauaugccccucggggcgagcucuacaaagagcugcagaaguccugcaccuucgacgaacaacgcacagcuaccauuauggaggaacuugccgaugcgcugauguacugucacggcaaaaaggucauccacagagacauuaagcccgagaaccuccugcuggggcucaaaggagaacugaagaucgccgauuuuggcuggagcgugcaugcuccuucucuucggcgcaaaacgaugugcgggacccuggacuaucugcccccggagaugauugagggaagaaugcacaaugaaaagguugaucucugguguaucggcgugcuuugcuacgagcugcucgucgggaacccucccuucgaauccgccagccauaaugagacauaucggagaaucgugaaaguggaccugaaguuuccugcuucuguccccaugggagcccaggaucugauuuccaaacuccugcgccacaaccccagcgaacggcuuccucuggcgcagguuucugcccacccgugggugagagcuaauucccgccgggugcugcccccuagcgcccuccaguccgucgcuuga

SEQ ID NO: 3040 - RNA, 360 nt, Artificial Sequence
  AAD48083 variant
augagcagauccguggcccuggcuguccucgcccugcuuucucugagcggccucgaggcgauccagcggacccccaagauucaaguuuacucccgccacccugcugaaaacgggaaaucuaauuuccugaacugcuaugugagcggauuucauccguccgacaucgagguggaucuucugaagaauggcgaaagaauugagaaagucgaacacucugaccucagcuucuccaaggauuggagcuuuuaccugcuguauuacacagaguucacgcccaccgagaaagacgaauaugccugucgggugaaccauguuacacucucucagccuaagaucgugaagugggaucgcgacauguga

SEQ ID NO: 3041 - RNA, 1137 nt, Artificial Sequence
  AAH28058 variant
augagaaugcuggugagcggccggcgcgucaagaaauggcagcucaucauucaacuguucgcuaccugcuuucuugccucccugauguucuuuugggagcccaucgacaaccacauuguuucucauaugaaaagcuacuccuauagauaccucaucaauucuuaugauuucgugaacgacacacugagccuuaagcacacguccgccgggccucgguaccaguaucugauuaaucauaaggaaaaaugucaggcgcaggaugugcuccugcugcucuuugucaagaccgcuccggagaacuacgaccgcagaucuggaauccggcgcacauggggcaaugaaaacuaugugagaagccaacugaaugccaacaucaagacccuuuucgcccuggggacacccaauccucucgagggagaggaacugcagcggaaacuugcuugggaggaucagcgcuacaacgacauuauccagcaagauuuuguugacuccuucuacaaucugacccucaagcugcugaugcaguuuagcugggccaacacauauugcccccacgcuaaauuccucaugaccgccgaugacgauauuuuuauccauaugccuaaucugauugaauaccuucagucucuggagcagaucggcgugcaagacuucuggauugggagaguccaccggggagcgcccccuauccgcgauaaguccagcaaauauuacgugucuuaugaaauguaccaguggccggccuaucccgacuacacggcuggcgccgcuuacguuaucuccggcgacguggccgcgaaggucuaugaggccagccagacccucaacucuucccuguacauugaugacguguuuauggggcuuugugcuaauaagaucggaauugugccucaagaucacgucuucuucagcggcgaggggaaaacacccuaucauccuugcaucuacgaaaagaugaugaccucccacggacaucuggaggaccuccaggaucuguggaaaaacgccacagaccccaagguuaaaaccauuucuaagggcuuuuucgggcagaucuauuguagacugaugaaaaucauucuccugugcaagaucagcuacguggauacguauccgugucgggcugccuuuauuuga

SEQ ID NO: 3042 - RNA, 1602 nt, Artificial Sequence
  AAA35516 variant
auguggcugggcagacgggcccucugcgcucuggugcuucugcucgccugugcgagccuggggcuucuguacgcuuccacccgcgacgcccccggacucagacugccucuggccccgugggcucccccucagucuccccggcgcccugagcuccccgaucuggccccugaaccgagauaugcucacauccccguccggauuaaggagcaaguugugggccuucuggccuggaacaauugcagcugugaauccucugggggaggccucccucugcccuuccagaaacaggugcgcgcgaucgaccuuacaaaggccuuugauccugcugagcugagagccgcuagcgccacgcgggaacaggaguuccaagcguuucucucccgcucucagagccccgccgaccagcugcugauugcuccggccaacuccccucuccaguacccccugcaaggggucgaggugcagccucuuagaagcauccugguucccggacucucucugcaggcugccuccggccaggaaguguaucaagucaaucuuaccgccagccugggcacaugggauguggcuggggagguuaccggagugacacucaccggcgaagggcaggcggaccugacacuggucucucccggacucgaucagcugaaccggcaacuucagcuggugaccuacuccagccgcucuuaucagacgaauaccgccgacacagugagauucuccaccgagggccaugaggcugccuuuacaauucggauccgccacccuccgaaccccagacucuacccucccgggagccugccucagggagcccaauauaauaucuccgcucuugucaccauugccacgaaaacauuccugcgguacgauagacuccgcgcgcugaucaccucuauucggagauuuuaccccacaguuaccguggugaucgcugacgauagcgacaagccggaacgcgucuccggcccuuauguggagcauuaccugaugcccuucggcaaagggugguuugccggacggaaccucgccguuagccaggugaccacaaaguauguccuguggguggaugacgacuucguuuuuacggcuagaacccgccuugaacggcugguggauguccucgagagaacaccucuggaccuggugggcggggccguccgcgaaauuucuggauucgcuaccacauaccggcagcuucucuccguggagcccggcgccccugggcugggaaauugccugagacagcgccggggcuuucaccaugagcucguuggcuuccccggguguguggucaccgauggagugguuaacuucuuucuggcgagaacggacaaggugcgggaagucggcuucgauccgcgccuuagcagaguggcccaccuggaguuuuuccucgacgggcugggaucucugcgggugggcagcugcuccgauguugucguggaccacgcuucuaaacuuaagcucccuuggacaagcagagaugccggggcugaaaccuaugcccgcuaccgguaucccggcucccuggacgagagccaaauggcgaaacauagacugcucuuuuucaagcaccgccugcaguguaugaccucucaguga

SEQ ID NO: 3043 - RNA, 849 nt, Artificial Sequence
  AAH74729 variant
auggccagccugggccagauccucuucugguccauuaucucuauuaucauuauccuggcuggggccaucgcgcuuauuaucggauuuggcauuagcgggagacacuccaucaccgugacaacggucgcuucugccggaaacauuggcgaggacgggauccugagcugcaccuucgaacccgauauuaagcucuccgacaucguuauccaauggcugaaagagggagugcuuggccuggugcacgaauuuaaggagggcaaagaugaacucucugagcaggacgagauguuccgggggcgcacagccgucuuugcugaucaggugauuguuggaaaugccagccugagacugaagaacgugcagcucaccgacgcuggcacauacaaauguuauaucauuaccuccaaggggaagggaaaugccaaccuggaauacaaaacaggcgcguucagcaugccugaggucaauguggauuauaacgccucuuccgaaacccuucggugcgaggcuccgcgcugguuuccccaaccuacgguugugugggccagccaggucgaccagggggcuaauuucucugagguguccaacaccagcuuugaacucaauucugagaacgugacaaugaaggucguuuccgugcuguacaaugugaccaucaacaauacauauagcuguaugauugaaaacgauaucgccaaagcgaccggagacaucaaggucacggaguccgaaauuaaaagacggucucaucugcagcuucugaauagcaaggccucccucugcgugagcucuuucuuugcuaucuccugggcccugcugccccucagcccuuaccugaugcuuaaguga

SEQ ID NO: 3044 - RNA, 132 nt, Artificial Sequence
  AAC50123 variant
auggccgcuagagccguguuccuggcgcucagcgcucagcugcuucaagcccggcugaugaaggaggaaucccccgucguuucuuggcgccucgagccugaagacggcaccgcccugugcuuuaucuucuga

SEQ ID NO: 3045 - RNA, 1158 nt, Artificial Sequence
  AAN40694 variant
auggccgcugcccuguucgugcuccugggcuuugcgcuucuggggacccacggagcuagcggcgccgccggguucguccaggcuccccucucccaacagagauggguuggaggcucuguggagcugcauugcgaagccguggggagcccugucccggagauccaguggugguuugaaggacagggccccaacgacacauguucccaacuuugggauggcgcucggcuggaccgcgugcacauucaugccacguaccaccagcaugcggccucuaccaucagcauugauacacucguugaggaagacaccgggacauaugagugcagagcuuccaaugauccugaccggaaccaccugacccgcgcccccagagugaaguggguccgggcucaggccgugguucuggugcucgagccuggaacagucuucaccacgguggaagaucugggcucuaaaauccuucugaccuguagccucaaugacuccgcgacagaggugaccgggcaccgcuggcugaagggaggcgucguucuuaaagaagaugcccugcccgggcagaagacagaguuuaaaguggacagcgaugaccaauggggagaguacucuugcguguuccucccugaaccgaugggcaccgcuaacauucagcugcaugggcccccuagagucaaggccgugaaguccagcgagcacaucaaugaaggcgagacggcuaugcugguuuguaaaucugaauccgugcccccugucacagauugggccugguauaagaucaccgacagcgaggacaaagcccucaugaacggaucugagucccgguuuuucgugagcuccucucagggccgcagcgaacugcauauugagaaucuuaacauggaagcugaucccgggcaguacagaugcaauggaacauccagcaagggcucugaccaagcgaucauuacccugcggguucgcucccaccucgccgcucuguggccguuucuugggaucguggccgagguccuggugcucgucaccauuaucuucauuuaugagaaaagacggaagccugaagaugugcuggacgaugacgaugccggaagcgcuccccugaagucuagcggccagcaccagaacgacaaaggcaagaauguucgccaaagaaacuccucuuga

SEQ ID NO: 3046 - RNA, 720 nt, Artificial Sequence
  ABX60202 variant
auggcccacgcuggcagaaccggguacgacaaccgggagaucgugaugaaguauauucauuacaaacugagccagcgcggauaugaaugggaugccggcgacgucggggcggcucccccuggagccgccccggcucccggcaucuucuccucucaaccugggcacacaccccauccugccgcuagcagagaucccguugcccggacguccccucuccagaccccggcggcccccggagcugccgcuggcccugcccugucucccgugccucccgugguccaccuuacacugcgccaggcgggcgacgauuuuagcagacgguaccgcagagacuucgccgagauguccucucagcuccaucugaccccguuuacagcucgggggcgcuucgccaccgugguugaagaacuuuuuagagauggagugaauuggggccggauugucgcuuucuuugaguucgggggagugaugugcguugagagcgugaaccgcgagauguccccucuggucgacaauaucgcccucuggaugacagaauaucugaacagacaucugcacaccuggauucaagauaauggcgggugggacgccuuuguggagcucuacggacccagcaugcggccucuguucgauuuuucuuggcuuucccugaagacgcuccugagccuugcucuggugggcgcguguaucacccucggcgccuaucugucucacaaauga

SEQ ID NO: 3047 - RNA, 1290 nt, Artificial Sequence
  ABX82700 variant
augguggaccccgucggcuucgccgaggcuuggaaggcccaguuuccugauagcgaaccgcccagaauggagcugcgguccguuggggacaucgaacaagagcucgaacgcugcaaagcgucuauuagacggcuggagcaggaggugaaccaggaacgcuucagaaugaucuaccuucagacccugcucgcuaaggagaaaaagagcuaugaucggcaacgcuggggauuuagacgggccgcccaggcuccugacggcgccuccgaaccccgcgcuucugccagcagaccucagcccgcgccugccgauggggcugacccgcccccugccgaggagcccgaagcucggccugauggagagggcucccccgggaaagcccgcccgggaacagcgagacggccuggcgccgcugccucuggcgaacgcgacgauagagggcccccugcuagcguggccgcccugcgguccaauuucgagcgcauuagaaagggacacggccagcccggggcugacgcggaaaagcccuuuuacgucaacguggaguuccaucacgagcggggacuuguuaaagugaaugauaaggaagucagcgacagaaucucuucccugggcagccaagccaugcagauggagcgcaaaaagucucagcauggggcuggauccagcgugggcgaugccucucggccuccguauagaggccgcuccagcgaauccucuugugggguugacggagacuacgaggaugccgaacucaacccccgguuucugaaagacaaucugauugaugcuaacggcgggagcagaccucccuggccuccccucgaguaucagccguaccaauccaucuaugugggaggcaugauggagggggaaggaaagggcccucugcuucgcagccagucuacguccgagcaggaaaagcggcugaccuggcccagacgcagcuacucuccucggagcuucgaggacugcggcgggggauacacacccgauuguuccucuaaugaaaaccucaccagcuccgaggaggacuuuagcucuggccaauccagcagagucucuccuucccccacaaccuaucggauguuccgcgauaaaagcagauccccgucucagaauagccagcaguccuuugacucuagcuccccucccacaccccaaugccacaagcggcauagacacuguccugugguggucagcgaagccaccaucguuggggugcgcaaaacgggacagauuuggccgaacgauggcgagggggcguuccacggcgacgcugauggaggcuga

SEQ ID NO: 3048 - RNA, 1665 nt, Artificial Sequence
  ABX82703 variant
augguggaccccgucggcuucgccgaggcuuggaaggcccaguuuccugauagcgaaccgcccagaauggagcugcgguccguuggggacaucgaacaagagcucgaacgcugcaaagcgucuauuagacggcuggagcaggaggugaaccaggaacgcuucagaaugaucuaccuucagacccugcucgcuaaggagaaaaagagcuaugaucggcaacgcuggggauuuagacgggccgcccaggcuccugacggcgccuccgaaccccgcgcuucugccagcagaccucagcccgcgccugccgauggggcugacccgcccccugccgaggagcccgaagcucggccugauggagagggcucccccgggaaagcccgcccgggaacagcgagacggccuggcgccgcugccucuggcgaacgcgacgauagagggcccccugcuagcguggccgcccugcgguccaauuucgagcgcauuagaaagggacacggccagcccggggcugacgcggaaaagcccuuuuacgucaacguggaguuccaucacgagcggggacuuguuaaagugaaugauaaggaagucagcgacagaaucucuucccugggcagccaagccaugcagauggagcgcaaaaagucucagcauggggcuggauccagcgugggcgaugccucucggccuccguauagaggccgcuccagcgaauccucuugugggguugacggagacuacgaggaugccgaacucaacccccgguuucugaaagacaaucugauugaugcuaacggcgggagcagaccucccuggccuccccucgaguaucagccguaccaauccaucuaugugggaggcaugauggagggggaaggaaagggcccucugcuucgcagccagucuacguccgagcaggaaaagcggcugaccuggcccagacgcagcuacucuccucggagcuucgaggacugcggcgggggauacacacccgauuguuccucuaaugaaaaccucaccagcuccgaggaggacuuuagcucuggccaauccagcagagucucuccuucccccacaaccuaucggauguuccgcgauaaaagcagauccccgucucagaauagccagcaguccuuugacucuagcuccccucccacaccccaaugccacaagcggcauagacacuguccugugguggucagcgaagccaccaucguuggggugcgcaaaacgggacagauuuggccgaacgauggcgagggggcguuccacggcgacgcugauggaucuuuuggcacacccccuggguacggaugcgccgccgaccgggcugaggaacagagacgccaucaggacggccugcccuauaucgaugacuccccuagcucuagcccccaccuuuccucuaaggggagaggaagccgggaugcccugguguccggcgcucucgagagcaccaaagccucugaacuggaccuggagaaggggcucgaaaugcgcaaauggguccuguccggcauucuugcgagcgaggaaaccuaccugucccaucucgaggcccugcuucugccuaugaagccccucaaggcugccgcuacaaccucucaaccggugcugacgagccagcagaucgagacaauuuucuucaaaguuccugaucugcucuga

SEQ ID NO: 3049 - RNA, 1545 nt, Artificial Sequence
  ABX82704 variant
augguggaccccgucggcuucgccgaggcuuggaaggcccaguuuccugauagcgaaccgcccagaauggagcugcgguccguuggggacaucgaacaagagcucgaacgcugcaaagcgucuauuagacggcuggagcaggaggugaaccaggaacgcuucagaaugaucuaccuucagacccugcucgcuaaggagaaaaagagcuaugaucggcaacgcuggggauuuagacgggccgcccaggcuccugacggcgccuccgaaccccgcgcuucugccagcagaccucagcccgcgccugccgauggggcugacccgcccccugccgaggagcccgaagcucggccugauggagagggcucccccgggaaagcccgcccgggaacagcgagacggccuggcgccgcugccucuggcgaacgcgacgauagagggcccccugcuagcguggccgcccugcgguccaauuucgagcgcauuagaaagggacacggccagcccggggcugacgcggaaaagcccuuuuacgucaacguggaguuccaucacgagcggggacuuguuaaagugaaugauaaggaagucagcgacagaaucucuucccugggcagccaagccaugcagauggagcgcaaaaagucucagcauggggcuggauccagcgugggcgaugccucucggccuccguauagaggccgcuccagcgaauccucuugugggguugacggagacuacgaggaugccgaacucaacccccgguuucugaaagacaaucugauugaugcuaacggcgggagcagaccucccuggccuccccucgaguaucagccguaccaauccaucuaugugggaggcaugauggagggggaaggaaagggcccucugcuucgcagccagucuacguccgagcaggaaaagcggcugaccuggcccagacgcagcuacucuccucggagcuucgaggacugcggcgggggauacacacccgauuguuccucuaaugaaaaccucaccagcuccgaggaggacuuuagcucuggccaauccagcagagucucuccuucccccacaaccuaucggauguuccgcgauaaaagcagauccccgucucagaauagccagcaguccuuugacucuagcuccccucccacaccccaaugccacaagcggcauagacacuguccugugguggucagcgaagccaccaucguuggggugcgcaaaacgggacagauuuggccgaacgauggcgagggggcguuccacggcgacgcugauggaucuuuuggcacacccccuggguacggaugcgccgccgaccgggcugaggaacagagacgccaucaggacggccugcccuauaucgaugacuccccuagcucuagcccccaccuuuccucuaaggggagaggaagccgggaugcccugguguccggcgcucucgagagcaccaaagccucugaacuggaccuggagaaggggcucgaaaugcgcaaauggguccuguccggcauucuugcgagcgaggaaaucacccuguga

SEQ ID NO: 3050 - RNA, 1326 nt, Artificial Sequence
  ABX82705 variant
augguggaccccgucggcuucgccgaggcuuggaaggcccaguuuccugauagcgaaccgcccagaauggagcugcgguccguuggggacaucgaacaagagcucgaacgcugcaaagcgucuauuagacggcuggagcaggaggugaaccaggaacgcuucagaaugaucuaccuucagacccugcucgcuaaggagaaaaagagcuaugaucggcaacgcuggggauuuagacgggccgcccaggcuccugacggcgccuccgaaccccgcgcuucugccagcagaccucagcccgcgccugccgauggggcugacccgcccccugccgaggagcccgaagcucggccugauggagagggcucccccgggaaagcccgcccgggaacagcgagacggccuggcgccgcugccucuggcgaacgcgacgauagagggcccccugcuagcguggccgcccugcgguccaauuucgagcgcauuagaaagggacacggccagcccggggcugacgcggaaaagcccuuuuacgucaacguggaguuccaucacgagcggggacuuguuaaagugaaugauaaggaagucagcgacagaaucucuucccugggcagccaagccaugcagauggagcgcaaaaagucucagcauggggcuggauccagcgugggcgaugccucucggccuccguauagaggccgcuccagcgaauccucuugugggguugacggagacuacgaggaugccgaacucaacccccgguuucugaaagacaaucugauugaugcuaacggcgggagcagaccucccuggccuccccucgaguaucagccguaccaauccaucuaugugggaggcaugauggagggggaaggaaagggcccucugcuucgcagccagucuacguccgagcaggaaaagcggcugaccuggcccagacgcagcuacucuccucggagcuucgaggacugcggcgggggauacacacccgauuguuccucuaaugaaaaccucaccagcuccgaggaggacuuuagcucuggccaauccagcagagucucuccuucccccacaaccuaucggauguuccgcgauaaaagcagauccccgucucagaauagccagcaguccuuugacucuagcuccccucccacaccccaaugccacaagcggcauagacacuguccugugguggucagcgaagccaccaucguuggggugcgcaaaacgggacagauuuggccgaacgauggcgagggggcguuccacggcgacgcugauggaucucuggaacuucagggcaagcccucccgguggacccaguga

SEQ ID NO: 3051 - RNA, 1575 nt, Artificial Sequence
  ABX82706 variant
augguggaccccgucggcuucgccgaggcuuggaaggcccaguuuccugauagcgaaccgcccagaauggagcugcgguccguuggggacaucgaacaagagcucgaacgcugcaaagcgucuauuagacggcuggagcaggaggugaaccaggaacgcuucagaaugaucuaccuucagacccugcucgcuaaggagaaaaagagcuaugaucggcaacgcuggggauuuagacgggccgcccaggcuccugacggcgccuccgaaccccgcgcuucugccagcagaccucagcccgcgccugccgauggggcugacccgcccccugccgaggagcccgaagcucggccugauggagagggcucccccgggaaagcccgcccgggaacagcgagacggccuggcgccgcugccucuggcgaacgcgacgauagagggcccccugcuagcguggccgcccugcgguccaauuucgagcgcauuagaaagggacacggccagcccggggcugacgcggaaaagcccuuuuacgucaacguggaguuccaucacgagcggggacuuguuaaagugaaugauaaggaagucagcgacagaaucucuucccugggcagccaagccaugcagauggagcgcaaaaagucucagcauggggcuggauccagcgugggcgaugccucucggccuccguauagaggccgcuccagcgaauccucuugugggguugacggagacuacgaggaugccgaacucaacccccgguuucugaaagacaaucugauugaugcuaacggcgggagcagaccucccuggccuccccucgaguaucagccguaccaauccaucuaugugggaggcaugauggagggggaaggaaagggcccucugcuucgcagccagucuacguccgagcaggaaaagcggcugaccuggcccagacgcagcuacucuccucggagcuucgaggacugcggcgggggauacacacccgauuguuccucuaaugaaaaccucaccagcuccgaggaggacuuuagcucuggccaauccagcagagucucuccuucccccacaaccuaucggauguuccgcgauaaaagcagauccccgucucagaauagccagcaguccuuugacucuagcuccccucccacaccccaaugccacaagcggcauagacacuguccugugguggucagcgaagccaccaucguuggggugcgcaaaacgggacagauuuggccgaacgauggcgagggggcguuccacggcgacgcugauggaucuuuuggcacacccccuggguacggaugcgccgccgaccgggcugaggaacagagacgccaucaggacggccugcccuauaucgaugacuccccuagcucuagcccccaccuuuccucuaaggggagaggaagccgggaugcccugguguccggcgcucucgagagcaccaaagccucugaacuggaccuggagaaggggcucgaaaugcgcaaaugggauccugucaagaugacccccacauucucccugcauuguaugauucuuuggccgguggagaucacccuguga

SEQ ID NO: 3052 - RNA, 1398 nt, Artificial Sequence
  ABX82707 variant
augguggaccccgucggcuucgccgaggcuuggaaggcccaguuuccugauagcgaaccgcccagaauggagcugcgguccguuggggacaucgaacaagagcucgaacgcugcaaagcgucuauuagacggcuggagcaggaggugaaccaggaacgcuucagaaugaucuaccuucagacccugcucgcuaaggagaaaaagagcuaugaucggcaacgcuggggauuuagacgggccgcccaggcuccugacggcgccuccgaaccccgcgcuucugccagcagaccucagcccgcgccugccgauggggcugacccgcccccugccgaggagcccgaagcucggccugauggagagggcucccccgggaaagcccgcccgggaacagcgagacggccuggcgccgcugccucuggcgaacgcgacgauagagggcccccugcuagcguggccgcccugcgguccaauuucgagcgcauuagaaagggacacggccagcccggggcugacgcggaaaagcccuuuuacgucaacguggaguuccaucacgagcggggacuuguuaaagugaaugauaaggaagucagcgacagaaucucuucccugggcagccaagccaugcagauggagcgcaaaaagucucagcauggggcuggauccagcgugggcgaugccucucggccuccguauagaggccgcuccagcgaauccucuugugggguugacggagacuacgaggaugccgaacucaacccccgguuucugaaagacaaucugauugaugcuaacggcgggagcagaccucccuggccuccccucgaguaucagccguaccaauccaucuaugugggaggcaugauggagggggaaggaaagggcccucugcuucgcagccagucuacguccgagcaggaaaagcggcugaccuggcccagacgcagcuacucuccucggagcuucgaggacugcggcgggggauacacacccgauuguuccucuaaugaaaaccucaccagcuccgaggaggacuuuagcucuggccaauccagcagagucucuccuucccccacaaccuaucggauguuccgcgauaaaagcagauccccgucucagaauagccagcaguccuuugacucuagcuccccucccacaccccaaugccacaagcggcauagacacuguccugugguggucagcgaagccaccaucguuggggugcgcaaaacgggacagauuuggccgaacgauggcgagggggcguuccacggcgaacaucccggagcugccgaggagguguuucagaagcugcuuccugacauccggggcgccgcugaugccgaccagcuggucugcgaaacccccgacuguccucaacacucugcugaucaucaguga

SEQ ID NO: 3053 - RNA, 1377 nt, Artificial Sequence
  ABX82709 variant
augguggaccccgucggcuucgccgaggcuuggaaggcccaguuuccugauagcgaaccgcccagaauggagcugcgguccguuggggacaucgaacaagagcucgaacgcugcaaagcgucuauuagacggcuggagcaggaggugaaccaggaacgcuucagaaugaucuaccuucagacccugcucgcuaaggagaaaaagagcuaugaucggcaacgcuggggauuuagacgggccgcccaggcuccugacggcgccuccgaaccccgcgcuucugccagcagaccucagcccgcgccugccgauggggcugacccgcccccugccgaggagcccgaagcucggccugauggagagggcucccccgggaaagcccgcccgggaacagcgagacggccuggcgccgcugccucuggcgaacgcgacgauagagggcccccugcuagcguggccgcccugcgguccaauuucgagcgcauuagaaagggacacggccagcccggggcugacgcggaaaagcccuuuuacgucaacguggaguuccaucacgagcggggacuuguuaaagugaaugauaaggaagucagcgacagaaucucuucccugggcagccaagccaugcagauggagcgcaaaaagucucagcauggggcuggauccagcgugggcgaugccucucggccuccguauagaggccgcuccagcgaauccucuugugggguugacggagacuacgaggaugccgaacucaacccccgguuucugaaagacaaucugauugaugcuaacggcgggagcagaccucccuggccuccccucgaguaucagccguaccaauccaucuaugugggaggcaugauggagggggaaggaaagggcccucugcuucgcagccagucuacguccgagcaggaaaagcggcugaccuggcccagacgcagcuacucuccucggagcuucgaggacugcggcgggggauacacacccgauuguuccucuaaugaaaaccucaccagcuccgaggaggacuuuagcucuggccaauccagcagagucucuccuucccccacaaccuaucggauguuccgcgauaaaagcagauccccgucucagaauagccagcaguccuuugacucuagcuccccucccacaccccaaugccacaagcggcauagacacuguccugugguggucagcgaagccaccaucguuggggugcgcaaaacgggacagauuuggccgaacgauggcgagggggcguuccacggcgacgcugauggaucuuuuggcacacccccuggguacugcugucugugccuucccgccuggccuuccggauguaccgccgcuaccgcccgggugacaagaagcuga

SEQ ID NO: 3054 - RNA, 1365 nt, Artificial Sequence
  ABX82710 variant
augguggaccccgucggcuucgccgaggcuuggaaggcccaguuuccugauagcgaaccgcccagaauggagcugcgguccguuggggacaucgaacaagagcucgaacgcugcaaagcgucuauuagacggcuggagcaggaggugaaccaggaacgcuucagaaugaucuaccuucagacccugcucgcuaaggagaaaaagagcuaugaucggcaacgcuggggauuuagacgggccgcccaggcuccugacggcgccuccgaaccccgcgcuucugccagcagaccucagcccgcgccugccgauggggcugacccgcccccugccgaggagcccgaagcucggccugauggagagggcucccccgggaaagcccgcccgggaacagcgagacggccuggcgccgcugccucuggcgaacgcgacgauagagggcccccugcuagcguggccgcccugcgguccaauuucgagcgcauuagaaagggacacggccagcccggggcugacgcggaaaagcccuuuuacgucaacguggaguuccaucacgagcggggacuuguuaaagugaaugauaaggaagucagcgacagaaucucuucccugggcagccaagccaugcagauggagcgcaaaaagucucagcauggggcuggauccagcgugggcgaugccucucggccuccguauagaggccgcuccagcgaauccucuugugggguugacggagacuacgaggaugccgaacucaacccccgguuucugaaagacaaucugauugaugcuaacggcgggagcagaccucccuggccuccccucgaguaucagccguaccaauccaucuaugugggaggcaugauggagggggaaggaaagggcccucugcuucgcagccagucuacguccgagcaggaaaagcggcugaccuggcccagacgcagcuacucuccucggagcuucgaggacugcggcgggggauacacacccgauuguuccucuaaugaaaaccucaccagcuccgaggaggacuuuagcucuggccaauccagcagagucucuccuucccccacaaccuaucggauguuccgcgauaaaagcagauccccgucucagaauagccagcaguccuuugacucuagcuccccucccacaccccaaugccacaagcggcauagacacuguccugugguggucagcgaagccaccaucguuggggugcgcaaaacgggacagauuuggccgaacgauggcgagggggcguuccacggcgacgcugauggaucuuuuggcacacccccuggguacggaugcgccgccggccggcccccucaucugaccgaacuucccgugcagcaccaguga

SEQ ID NO: 3055 - RNA, 1404 nt, Artificial Sequence
  ABX82711 variant
augguggaccccgucggcuucgccgaggcuuggaaggcccaguuuccugauagcgaaccgcccagaauggagcugcgguccguuggggacaucgaacaagagcucgaacgcugcaaagcgucuauuagacggcuggagcaggaggugaaccaggaacgcuucagaaugaucuaccuucagacccugcucgcuaaggagaaaaagagcuaugaucggcaacgcuggggauuuagacgggccgcccaggcuccugacggcgccuccgaaccccgcgcuucugccagcagaccucagcccgcgccugccgauggggcugacccgcccccugccgaggagcccgaagcucggccugauggagagggcucccccgggaaagcccgcccgggaacagcgagacggccuggcgccgcugccucuggcgaacgcgacgauagagggcccccugcuagcguggccgcccugcgguccaauuucgagcgcauuagaaagggacacggccagcccggggcugacgcggaaaagcccuuuuacgucaacguggaguuccaucacgagcggggacuuguuaaagugaaugauaaggaagucagcgacagaaucucuucccugggcagccaagccaugcagauggagcgcaaaaagucucagcauggggcuggauccagcgugggcgaugccucucggccuccguauagaggccgcuccagcgaauccucuugugggguugacggagacuacgaggaugccgaacucaacccccgguuucugaaagacaaucugauugaugcuaacggcgggagcagaccucccuggccuccccucgaguaucagccguaccaauccaucuaugugggaggcaugauggagggggaaggaaagggcccucugcuucgcagccagucuacguccgagcaggaaaagcggcugaccuggcccagacgcagcuacucuccucggagcuucgaggacugcggcgggggauacacacccgauuguuccucuaaugaaaaccucaccagcuccgaggaggacuuuagcucuggccaauccagcagagucucuccuucccccacaaccuaucggauguuccgcgauaaaagcagauccccgucucagaauagccagcaguccuuugacucuagcuccccucccacaccccaaugccacaagcggcauagacacuguccugugguggucagcgaagccaccaucguuggggugcgcaaaacgggacagauuuggccgaacgauggcgagggggcguuccacggcgacgcugugcugaagaccgaagucccccaucagggagugcggagagcccgccuuucucuggaggcccucggcgaggauccuuccuuucuguuccccgcuagcgacgggccuagacacucuuccacaugguga

SEQ ID NO: 3056 - RNA, 1542 nt, Artificial Sequence
  ABX82712 variant
augguggaccccgucggcuucgccgaggcuuggaaggcccaguuuccugauagcgaaccgcccagaauggagcugcgguccguuggggacaucgaacaagagcucgaacgcugcaaagcgucuauuagacggcuggagcaggaggugaaccaggaacgcuucagaaugaucuaccuucagacccugcucgcuaaggagaaaaagagcuaugaucggcaacgcuggggauuuagacgggccgcccaggcuccugacggcgccuccgaaccccgcgcuucugccagcagaccucagcccgcgccugccgauggggcugacccgcccccugccgaggagcccgaagcucggccugauggagagggcucccccgggaaagcccgcccgggaacagcgagacggccuggcgccgcugccucuggcgaacgcgacgauagagggcccccugcuagcguggccgcccugcgguccaauuucgagcgcauuagaaagggacacggccagcccggggcugacgcggaaaagcccuuuuacgucaacguggaguuccaucacgagcggggacuuguuaaagugaaugauaaggaagucagcgacagaaucucuucccugggcagccaagccaugcagauggagcgcaaaaagucucagcauggggcuggauccagcgugggcgaugccucucggccuccguauagaggccgcuccagcgaauccucuugugggguugacggagacuacgaggaugccgaacucaacccccgguuucugaaagacaaucugauugaugcuaacggcgggagcagaccucccuggccuccccucgaguaucagccguaccaauccaucuaugugggaggcaugauggagggggaaggaaagggcccucugcuucgcagccagucuacguccgagcaggaaaagcggcugaccuggcccagacgcagcuacucuccucggagcuucgaggacugcggcgggggauacacacccgauuguuccucuaaugaaaaccucaccagcuccgaggaggacuuuagcucuggccaauccagcagagucucuccuucccccacaaccuaucggauguuccgcgauaaaagcagauccccgucucagaauagccagcaguccuuugacucuagcuccccucccacaccccaaugccacaagcggcauagacacuguccugugguggucagcgaagccaccaucguuggggugcgcaaaacgggacagauuuggccgaacgauggcgagggggcguuccacggcgacgcugauggaucuuuuggcacacccccuggguacggaugcgccgccgaccgggcugaggaacagagacgccaucaggacggccugcccuauaucgaugacuccccuagcucuagcccccaccuuuccucuaaggggagaggaagccgggaugcccugguguccggcgcucucgagagcaccaaagccucugaacuggacccugucaagaugacccccacauucucccugcauuguaugauucucuggccgguggagaucacccuguga

SEQ ID NO: 3057 - RNA, 1221 nt, Artificial Sequence
  ABX82714 variant
augguggaccccgucggcuucgccgaggcuuggaaggcccaguuuccugauagcgaaccgcccagaauggagcugcgguccguuggggacaucgaacaagagcucgaacgcugcaaagcgucuauuagacggcuggagcaggaggugaaccaggaacgcuucagaaugaucuaccuucagacccugcucgcuaaggagaaaaagagcuaugaucggcaacgcuggggauuuagacgggccgcccaggcuccugacggcgccuccgaaccccgcgcuucugccagcagaccucagcccgcgccugccgauggggcugacccgcccccugccgaggagcccgaagcucggccugauggagagggcucccccgggaaagcccgcccgggaacagcgagacggccuggcgccgcugccucuggcgaacgcgacgauagagggcccccugcuagcguggccgcccugcgguccaauuucgagcgcauuagaaagggacacggccagcccggggcugacgcggaaaagcccuuuuacgucaacguggaguuccaucacgagcggggacuuguuaaagugaaugauaaggaagucagcgacagaaucucuucccugggcagccaagccaugcagauggagcgcaaaaagucucagcauggggcuggauccagcgugggcgaugccucucggccuccguauagaggccgcuccagcgaauccucuugugggguugacggagacuacgaggaugccgaacucaacccccgguuucugaaagacaaucugauugaugcuaacggcgggagcagaccucccuggccuccccucgaguaucagccguaccaauccaucuaugugggaggcaugauggagggggaaggaaagggcccucugcuucgcagccagucuacguccgagcaggaaaagcggcugaccuggcccagacgcagcuacucuccucggagcuucgaggacugcggcgggggauacacacccgauuguuccucuaaugaaaaccucaccagcuccgaggaggacuuuagcucuggccaauccagcagagucucuccuucccccacaaccuaucggauguuccgcgauaaaagcagauccccgucucagaauagccagcaguccuuugacucuagcuccccucccacaccccaaugccacaagcggcauagacacuguccugugguggucagcgaagccaccucugggcaguga

SEQ ID NO: 3058 - RNA, 2346 nt, Artificial Sequence
  AAH58926 variant
auggccacccaggcugaccugauggagcucgauauggccauggaacccgacagaaaggcggcugugagccacuggcaacagcaguccuaccuggauucuggcauccauagcggggccacaacgaccgccccuucccuuucuggaaaaggcaacccggaggaagaggacgucgauacaagccagguucuguaugaaugggagcaaggguucucccagucuuuuacccaggaacagguggcugacauugauggacaauacgccaugacacgggcucagcgcgugagagccgcgauguuccccgagacccucgacgagggcaugcagaucccuagcacacaguuugaugccgcucaccccaccaauguccaacggcuggccgaaccuucccagaugcuuaagcaugcugugguuaaccugauuaauuaucaggacgaugccgagcucgcgacgcgcgccauccccgagcugaccaaacugcucaacgacgaagaucaaguggucgugaauaaggcugccguuauggugcaccagcugagcaaaaaggaggcuucuagacaugccauuaugcgguccccucagauggucagcgccaucgugcgcacaaugcagaacaccaaugacguggaaacagcuagaugcaccgcggggacgcuucacaaccugucucaccaucgggagggacuccuggccaucuucaaguccggcggcauuccggcucuugucaaaaugcuggggagccccguugacucugugcucuuuuacgccaucacaacccugcacaaucugcuccugcaucaagaaggagccaagauggcugugcgccuugccggcgggcugcagaaaauggucgcgcuccugaacaagacaaaugugaaauuccuugcuauuaccaccgauugucugcagauccucgccuauggaaaccaggaguccaagcugauuauccuggccagcggcgggccucaagcucucguuaauauuaugagaacauacacguaugagaagcugcuuuggaccacaucccgggugcugaaaguccucucugugugcagcuccaacaagcccgccaucguugaagcuggaggcaugcaggcccugggccuucaccugaccgacccuagccagcgccucgugcagaauugucuguggacacugagaaaccucucugaugcggccaccaaacaagaggggauggaaggacugcuuggcacgcugguccagcuccugggguccgacgauaucaacguggucacaugcgcugccggcauucugagcaaucuuaccuguaacaauuacaagaacaaaaugauggugugccagguuggagggaucgaggcucucgugcggaccguccugcgcgccggagacagagaagauauuacagagcccgcgaucugugcccugcggcaccucaccucuagacaucaggaggcugaaauggcccaaaaugcugugcgccugcacuacggccuuccgguuguggucaagcugcuccauccucccagccacuggccucugauuaaagccacagugggccugauccggaaccuugcccucugccccgcuaaucaugcgccccugagagagcagggggccaucccucgccuggugcagcuccugguucgggcucaccaagacacgcagagacgcaccuccaugggaggcacacagcagcaauuugucgaaggggugcggauggaggaaauuguggagggauguaccggcgcccuucacauccuggccagagauguccauaaccgcauugugauccgggggcucaauacaauuccgcuguucguucagcugcuuuauucucccaucgagaacauccagagaguggcugccggcguccucugcgaacuggcgcaggacaaggaggcugccgaagccauugaggcugagggagccaccgcgccucugacggaacuccugcacagccgcaaugagggcguggcuaccuacgccgccgcuguucuuuuucggauguccgaagauaagccccaagacuauaaaaagagacugagcguggagcucacaucuucccuguuccggaccgaaccuauggccuggaacgagacagcugaccuggggcuugauaucggagcccagggcgagccccucggguaccgccaggacgauccgagcuauagaucuuuucauuccggaggcuacgggcaggacgcgcugggcauggauccuaugauggaacacgagaugggaggccaccaucccggggccgacuauccugucgauggacugcccgaccucggccacgcucaagaucugauggacgggcuuccucccggagauagcaaucagcuggccugguucgacaccgaucucuga

SEQ ID NO: 3059 - RNA, 1692 nt, Artificial Sequence
  AAI21007 variant
auggacgugggcgagcugcucagcuaccagcccaacagagggaccaagcggccucgcgaugacgaagaggaagaacagaaaaugagacggaagcaaacaggaacgcgcgaaagaggccgguaucgcgaggaggaaaugaccgucguugaggaagccgaugacgauaaaaagagacugcuucagaucauugaccgggauggggaggaggaagaggaagaggaggagccgcuggacgaguccucugugaaaaagaugauccucacauucgaaaagcgcagcuacaaaaaucaggagcugagaauuaaguuucccgauaacccugaaaaauucauggaguccgaacuugaccugaaugauaucauucaagagaugcacguggucgcuaccaugcccgaccucuaucaucugcugguggagcucaacgccguucagucucugcuuggacugcucggccacgauaauacagacgugagcaucgcggucguggaccugcuucaggaacugaccgauaucgacacacuccaugaguccgaagagggggcugaaguucugauugaugcccugguggacggacaggucguggcccuccuggugcaaaaccuugagcggcuggaugagucugucaaggaagaggcugacggcguucacaauacccucgccaucguggaaaacauggcugaguuucgcccugagaugugcacggaaggcgcccagcaggggcugcuucaguggcugcucaaaagacugaaggcgaagaugcccuucgaugccaauaaacuguacuguagcgaggugcucgcuauucugcuucaagacaacgaugaaaaucgggagcugcucggagaacuggacggcaucgauguccuucugcagcagcucuccguguuuaagcgccauaacccuagcaccgccgaggagcaagaaaugauggagaaucuguucgacucucugugcuccugucucaugcugagcucuaacagagaacgguuucuuaaaggggagggacugcagcucaugaaucugaugcugagagaaaagaaaauuucccgcagcucugcucuuaagguucucgaccacgccaugaucggcccggaggggacagauaacugccacaaauucguggacauucugggacugcggaccaucuuuccccucuucaugaaguccccuagaaagaucaaaaaggucggcacaaccgagaaagaacaugaggaacacguguguagcauucuggcgucccuucugcgcaaccuccggggccagcagagaacgcgccugcugaauaaguuuacagagaacgauucugaaaaaguugaccggcuuauggagcuccauuucaaguaucugggggccaugcaaguggcugauaagaaaaucgagggagaaaagcacgacauggucagacgcggcgagauuaucgauaaugacaccgaagaggaguuuuaccugcggagacucgaugccgggcuguucgugcuucagcacauuugcuauaucauggcugaaaucuguaacgccaaugucccccagauucgccagcgggugcaucaaauccugaacaugagaggaagcuccauuaaaaucguucggcacauuaucaaggaguacgccgaaaauaucggcgacgggcgcagcccugaguucagagaaaacgagcagaaacggauucucggacugcuggagaauuuuuga

SEQ ID NO: 3060 - RNA, 1833 nt, Artificial Sequence
  CCDS4772.1 variant
auggagaccgcccccaagccuggcaaagacgugccgcccaagaaagauaagcugcagacaaaaagaaagaagccucggcgcuacugggaagaggaaacgguccccaccacagcuggggccagcccuggacccccuagaaacaaaaagaaucgggagcuccgcccgcaaagacccaaaaacgcguauauccugaagaaaucccggauuucuaagaagccucagguucccaaaaagccucgcgaauggaaaaaucccgagagccagagaggccuuuccgggacccaggacccguucccuggacccgcuccugugcccguggaggucgugcaaaaguuuugccggaucgauaaaucucgcaagcugccccacagcaaagccaagacaagaucccggcucgaaguugccgaggcugaagaggaggaaaccucuauuaaggccgcucgcagcgagcugcuucuggccgaggaaccuggcuuccucgaaggggaggacggagaggauacagcgaaaaucugucaggccgacauuguggaagcugucgauaucgccuccgcugccaagcauuuugaccugaaccugagacaguucggcccguaccggcucaauuauagccgcaccggcagacaccuggcguuugggggacggagaggccauguggccgcucuugauuggguuacgaaaaagcugaugugcgagaucaacgugauggaagccguccgcgacauucgguuccuccacucugaggcucugcuugccguggcccagaauagauggcugcauaucuacgauaaccaagggauugaacuccacuguauccgccggugcgacagagugacccgccuggaguuucugcccuuccacuuucuccuggcuacagcguccgagaccggauuccuuacauaucuggaugucagcguuggcaaaauuguggccgcucucaaugcccgggccgggagacuggacgugaugucucagaacccuuacaaugcugucauccaucuuggacacuccaacggcaccgugagccuguggucucccgccaugaaggaaccucucgcgaagauucugugucaucgcggcgggguucgggcuguggccgucgacuccacgggaacauauauggccaccagcggccuggaucaccagcucaaaaucuuugaccugagagggacauaccagccccuuuccacccgcacccugccgcacggagcuggccaucucgccuucucucaacgggggcugcuuguggcuggaaugggcgauguugugaauaucugggccggccaggggaaggcgagcccucccucccuggagcagccuuaccucacacacagacugagcggacccguccauggccugcaauuuugcccuuucgaagacgugcucggggucggacacacgggcgggauuaccucuaugcuggugcccggcgccggagagccgaacuucgauggccuugaauccaauccuuaucggagccgcaaacagagacaggagugggagguuaaggcucugcucgaaaaagugcccgccgagcugaucugucuggacccccgggcucuugccgaagucgaugugauuucucucgagcaggggaagaaggagcaaaucgaaagacugggauacgacccucaggcgaaagccccguuucagcccaagccuaaacagaagggccgcagcuccacagcuucucugguuaaacggaagagaaaggugauggaugaggaacaucgcgacaaagucagacaaagccuccagcagcagcaccacaaggaggccaaagcuaagcccaccggggcccggccuuccgcccuggaucgcuucgugagauga

SEQ ID NO: 3061 - RNA, 897 nt, Artificial Sequence
  AAG37878 variant
augggccccaaggacagcgccaaaugccugcacagagggccucagccgucccauugggcugccggagauggccccacccaagagcggugugggccucgcucucucggaagccccgugcugggccuugacacaugcagagcgugggaucacgucgacgggcagauccugggacagcuccggccucugacggaagaggaagaggaagagggcgcuggcgccacccuuucccgcgggcccgccuucccuggaaugggcucugaggaacugagacucgcuagcuuuuacgauuggccgcugacagccgagguucccccugaacugcucgcugccgcgggguucuuucauaccggacaccaggacaaggugcgguguuucuuuugcuauggcgggcugcaauccuggaaacgcggagaugaccccuggacagagcaugccaagugguucccuucuugucaguuucuucugagaagcaaaggccgggauuucgugcacuccguccaggagacccacagccagcuccugggcucuugggaccccugggaggaaccggaagaugcugccccuguggcucccuccguuccugccagcggguaccccgagcuucccacaccucgcagagaagugcaaucugaguccgcgcaggagccgggaggcgucagccccgccgaagcucagcgggccuggugggugcuggagccucccggggcucgcgacguugaagcccagcucagacggcugcaagaggaaagaaccugcaaggugugucuggaucgcgccgucucuauuguguuugugccuugcggacaucucgucugugcugagugcgcgcccggccugcagcuuuguccgaucugccgggccccuguuagaucccgcgugcggacguuccugagcuga

SEQ ID NO: 3062 - RNA, 2280 nt, Artificial Sequence
  EAW60925 variant
auggaccugagcgcccucagaguggaggaaguccagaacguuaucaaugcuaugcaaaagauucuggagugccccaucugucuugaacugauuaaagagccuguguccaccaagugcgaucacaucuucuguaaauuuugcaugcucaagcugcuuaaccagaaaaagggcccgucucaguguccccugugcaagaaugacauuacaaaacggagccuccaggaauccacgcgcuucucucaacugguggaggagcugcucaagaucaucugugccuuucagcuggauaccgggcuugaauacgcgaacagcuauaauuucgcuaaaaaggagaacaauuccccugaacaucugaaagacgaggucucuauuauccagagcaugggauacagaaaccgggccaagcgccuccugcaguccgagcccgaaaauccuagccuucaagagacaucucuguccgugcagcucagcaaccugggcaccguuagaacacugcggaccaagcagcgcauucagccccagaaaacaucuguguauaucgaacucggguccgauagcucugaggacaccgucaauaaggccacguacugcuccgugggagaucaagaacugcuucagauuaccccucaaggcacaagagacgagaucagccuggauuccgcuaaaaaggccgcuugugaguuuucugaaaccgacguuacaaacaccgagcaccaucagccgagcaauaacgaucucaauacgacagaaaaacgggccgcggagcgccaccccgaaaaguaucagggggaggccgcuuccggaugcgagagcgaaaccucuguguccgaggacuguagcggccugucuagccaguccgauauucuuacaacccaacagagagacaccaugcagcauaaccugaucaaacuccagcaagaaauggccgagcuggaagcuguccuggagcagcacggcucucagccuagcaacuccuaccccagcaucauuucugacuccagcgcccucgaggaucugcggaauccugaacagucuacauccgagaaggugcuuacgagccaaaaguccucugaauaucccaucagccagaacccggaggggcuguccgcggacaaauucgaggugucugccgauagcuccaccagcaagaauaaagaaccuggagucgagagaucuucccccagcaagugcccuucucucgacgaucgcugguacaugcacuccugcagcggcucucugcagaaccggaauuaccccagccaggaagaacuuauuaaaguuguggacguggaggagcaacagcuggaggaauccgggccccaugaucucacagagaccagcuaucugccucgccaggaccuggaaggaacaccguaccucgagucuggcaucucccuguuuagcgaugaccccgaauccgauccuucugaggacagagcucccgagagcgcccgggucgggaacauuccuuccucuaccagcgcucuuaaggugccccaacugaagguugccgaauccgcccagucuccggcugcggcccacacgacagacaccgcuggauauaaugccauggaggaaagcguguccagagagaaaccugaacucaccgccagcacagagcgcgucaacaagcggaugucuauggugguuuccggccugacccccgaggaguucaugcugguguacaaauuugcuagaaagcaucacaucacacuuacgaaucucaucaccgaagaaacaacccacgucgugaugaaaacagaugccgaguucgucugugagcgcacccugaaguauuuucugggcauugcugggggaaagugggugguuagcuacuucugggugacgcagucuaucaaagaacggaagaugcucaacgagcaugacuuugaagucagaggcgaugugguuaaugggcgcaaccaccagggaccuaaacgggcgagagagucccaagaccgcaagauuuuccggggccuggaaaucugcuguuaugggcccuucaccaauaugccuacagaucagcuugaguggauggugcagcugugcggagccagcgucgugaaagagcucucuuccuuuacccugggcacaggcgugcaucccauuguugucgugcagccggacgccuggaccgaagauaacggguuccacgcuaucggacaaaugugugaggccccuguggucacgagagaaugggugcuggacagcguugcucuuuaccagugccaggagcucgauacauaccugaucccccagauuccccauucccacuauuga

SEQ ID NO: 3063 - RNA, 2160 nt, Artificial Sequence
  EAW60922 variant
auggaccugagcgcccucagaguggaggaaguccagaacguuaucaaugcuaugcaaaagauucuggagugccccaucugucuugaacugauuaaagagccuguguccaccaagugcgaucacaucuucuguaaauuuugcaugcucaagcugcuuaaccagaaaaagggcccgucucaguguccccugugcaagaaugacauuacaaaacggagccuccaggaauccacgcgcuucucucaacugguggaggagcugcucaagaucaucugugccuuucagcuggauaccgggcuugaauacgcgaacagcuauaauuucgcuaaaaaggagaacaauuccccugaacaucugaaagacgaggucucuauuauccagagcaugggauacagaaaccgggccaagcgccuccugcaguccgagcccgaaaauccuagccuucaagagacaucucuguccgugcagcucagcaaccugggcaccguuagaacacugcggaccaagcagcgcauucagccccagaaaacaucuguguauaucgaacucgccgcuugcgaguuuuccgaaaccgaugucacgaauaccgagcaccaucaaccuagcaacaaugaccugaacacaaccgagaagagagccgcugaacggcacccggagaaauaccagggggaagccgcgucuggaugugaguccgaaacaagcguguccgaggauugcucuggccuuagcucccaaagcgacauucugaccacgcagcagcgcgauacaaugcagcauaaucucaucaagcugcaacaggagauggccgaacuugaggcuguucuggaacagcacgggucucagcccuccaacagcuauccuucuauuaucagcgacuccucugcccucgaggaucugagaaaccccgaacaaagcaccuccgagaaagcugugcugacaagccagaagucuuccgaguacccuaucagccagaaucccgaaggacucucugccgacaaauucgaggucuccgcggauagcuccaccucuaagaacaaggaaccgggcguggagcggagcuccccuucuaaaugucccagccuggacgaccgcugguauaugcacuccugcagcggcucucuucagaauagaaacuacccuucccaagaggaacugauuaagguggucgauguugaggaacagcagcucgaggaaagcgggccccaugaccugaccgagacaucuuaccuuccccggcaggaucuggagggaacgccuuaucucgaauccggcaucagccuguuuucugacgauccggagagcgaccccuccgaagaucgcgccccugagagcgcuagaguggggaauauucccucuuccaccagcgcccugaaagugccucaacucaaggucgcugaauccgcccagucucccgccgcugcgcacacaaccgacacagccggauacaacgcuauggaggagagcgugucccgggaaaaaccggagcugaccgccucuacggaaagaguuaauaagcgcaugagcaugguggucuccggccuuacaccugaggaguucaugcugguguauaaguuugcccggaaacaucacaucacccucaccaaccugauuacagaagagaccacacacguugugaugaagacggaugcugaguucgucugcgaaagaacccugaaauacuuucuugggaucgccggaggcaaguggguggucucuuauuucugggugacacagagcaucaaagaacgcaagaugcucaaugagcaugacuuugagguucggggcgauguggucaacgggagaaaucaccaaggacccaagcgcgcgcgggaaucccaggacagaaaaauuuuccgcggccuggagaucuguugcuacgggccuuucaccaacaugcccacagaccagcuggaauggauggugcagcucuguggagcuagcguugugaaggagcugucuuccuuuacccuuggcacggggguccauccuauuguggugguucaacccgaugccuggaccgaagacaauggauuccacgccaucggccagaugugcgaggcuccggucgugacacgggagugggugcuggauagcgucgcccucuaucagugucaggaacuggacaccuaccugauuccucaaaucccccauucucacuacuga

SEQ ID NO: 3064 - RNA, 2166 nt, Artificial Sequence
  EAW60923 variant
auggaccugagcgcccucagaguggaggaaguccagaacguuaucaaugcuaugcaaaagauucuggagugccccaucugucuugaacugauuaaagagccuguguccaccaagugcgaucacaucuucuguaaauuuugcaugcucaagcugcuuaaccagaaaaagggcccgucucaguguccccugugcaagaaugacauuacaaaacggagccuccaggaauccacgcgcuucucucaacugguggaggagcugcucaagaucaucugugccuuucagcuggauaccgggcuugaauacgcgaacagcuauaauuucgcuaaaaaggagaacaauuccccugaacaucugaaagacgaggucucuauuauccagagcaugggauacagaaaccgggccaagcgccuccugcaguccgagcccgaaaauccuagccuucaagagacaucucuguccgugcagcucagcaaccugggcaccguuagaacacugcggaccaagcagcgcauucagccccagaaaacaucuguguauaucgaacucggguccgauagcucugaggacaccgucaauaaggccacguacugcuccgugggagaucaagaacugcuucagauuaccccucaaggcacaagagacgagaucagccuggauuccgcuaaaaagggggaggccgcuucuggaugugaaagcgagaccuccguuagcgaagacugcucuggccucuccagccagucugauauucugacaacccagcagcgggacacgaugcaacacaaccuuaucaaacugcagcaggagauggccgaacucgaggcggugcuggagcagcauggcagccaaccguccaauucuuaucccagcaucauuuccgauagcucugcccuggaagaccuccgcaacccugagcaguccacaagcgaaaaggcuguccugaccucucagaaauccagcgaguaccccaucucccagaauccugaagggcuuucugccgacaaguuugaggugagcgcugauuccucuacaagcaagaacaaagagcccggaguggaaagauccagcccgucuaaguguccuucccuggacgaucggugguauaugcacagcugcucuggcucccuccaaaaccgcaauuaccccagccaggaggaacugauuaaagucguugacguggaggagcagcagcuugaagagucugggccucaugaucugaccgaaaccagcuaccuccccagacaagaccuggagggaacacccuaucuggaauccggcaucagccucuucucugaugacccugaguccgauccgagcgaggaccgggcccccgaauccgcgcgcguggggaacauuccuucuagcacguccgcccugaaggucccccagcuuaaaguggcugagucugcccagagcccugcugccgcccacaccacagauaccgcuggauacaaugcgauggaagaguccguuucuagagaaaagcccgagcugacagccagcaccgagcgggugaacaagagaauguccauggucgugagcggccucacgccggaagaguuuaugcugguuuauaaauucgcucgcaagcaccauaucacacugaccaaucuuaucaccgaagagacaacccacguggucaugaaaacagacgccgaauuugugugcgagcggacgcucaaguacuuccugggcauugccgggggaaaaugggucgugucuuauuuuuggguuacccaauccaucaaggagagaaagaugcugaacgaacaugacuucgaggugcgcggcgaugucgugaaugggcggaaccaccagggaccuaaaagagcucgcgaaagccaggaccggaagauuuuuagaggccucgagaucuguugcuacgggcccuucacaaauaugccuaccgaucagcuggaguggaugguucaacuuuguggagccucuguggucaaagaacuguccagcuucacacucggcaccggcgugcaccccauugugguuguccagccugacgcguggacggaggauaacggguuucaugcuaucggacagaugugcgaagcccccguggugacccgcgaguggguccuggacucuguggcccuguaucagugucaagaacuugauacauaccucaucccgcagauuccucacucccauuacuga

SEQ ID NO: 3065 - RNA, 36 nt, Artificial Sequence; identical to SEQ ID NO: 2057
  AIC83575 variant

SEQ ID NO: 3066 - RNA, 522 nt, Artificial Sequence
  ABC59810 variant
auggacgccgaguucgugugcgaaagaacccugaaguacuuucucggcaucgcugggggaaaaugggucguuagcuauuucugggugacacaguccauuaaggagcggaaaaugcugaacgaacacgauuuugaggugcgcggcgacgucgugaaugggagaaaccaucaaggacccaagcgggcccgcgaaucucaggauagaaaaaucuuccggggccuugagauuuguugcuacgggccuuuuacgaauaugccgaccgaccagcuggaguggaugguucagcucuguggagcgagcguggucaaggaacuguccucuuucacacuuggcaccggcgugcaccccaucguugugguccaaccugaugcuuggacagaggacaacggguuucaugccauuggacagaugugcgaagcccccguggugacccgcgaguggguccuggauagcguugcucucuaucagugucaggagcuggacacauaccugaucccucaaaucccccacucccauuauuga

SEQ ID NO: 3067 - RNA, 1065 nt, Artificial Sequence
  ABC88652 variant
augcacagcugcuccggcucucugcagaacagaaauuaccccagccaagaggaacucaucaagguggucgacguugaggaacagcagcuggaggaauccgggccucaugaucuuaccgagacaucuuaucugccgcggcaggaccucgagggaacgcccuaccuggaaagcggcauuucccuuuucucugaugacccugagagcgaucccuccgaagaccgcgccccugagagcgcuagaguggggaacauccccucuuccaccagcgcccugaaagugccucaacucaaggucgcggagucugcucagggaccggccgccgcucacacaaccgauacagccggcuauaaugcuauggaagaguccgugagccgggaaaaacccgagcugaccgccucuacagaacgcguuaacaagagaauguccaugguggucagcgggcugaccccugaggaguuuaugcucguguacaaauucgcgcggaagcaucacauuacgcugaccaaucuuaucacagaagagaccacacauguugugaugaagaccgacgccgaauuugucugugagcgcacgcugaaauauuuccucggaauugcuggcggcaagugggugguguccuacuuuugggucacacagucuaucaaagaaagaaagaugcugaacgagcacgauuucgagguucgcggggacguggugaauggacggaaccaccagggccccaaaagagcccgggaaagccaagaucgcaagaucuuuagagggcuugagauuugcuguuauggaccuuucaccaauaugcccacagaccagcuggaauggaugguccagcucugcggcgcuuccgugguuaaggagcugagcucuuuuacccuggggaccggagugcauccgaucgucgugguucagccugaugccuggacagaagacaacggcuuccacgcgauuggccaaaugugugagacgcccguggucacccgggagugggugcucgacuccgucgcccuguaccagugccaggaacuugauacauaccugaucccucaaauuccccauagccacuauuga

SEQ ID NO: 3068 - RNA, 2043 nt, Artificial Sequence
  EAW60939 variant
auggaccugagcgcccucagaguggaggaaguccagaacguuaucaaugcuaugcaaaagauucuggagugccccaucugucuugaacugauuaaagagccuguguccaccaagugcgaucacaucuucuguaaauuuugcaugcucaagcugcuuaaccagaaaaagggcccgucucaguguccccugugcaagaaugacauuacaaaacggagccuccaggaauccacgcgcuucucucaacugguggaggagcugcucaagaucaucugugccuuucagcuggauaccgggcuugaauacgcgaacagcuauaauuucgcuaaaaaggagaacaauuccccugaacaucugaaagacgaggucucuauuauccagagcaugggauacagaaaccgggccaagcgccuccugcaguccgagcccgaaaauccuagccuucaagagacaucucuguccgugcagcucagcaaccugggcaccguuagaacacugcggaccaagcagcgcauucagccccagaaaacaucuguguauaucgaacucggggaggccgcuuccggaugcgaaagcgagaccucugucuccgaggauuguagcggccuguccucucaaagcgacauucuuacgacccagcaaagagauacaaugcagcacaaucugaucaagcuccagcaggaaauggccgagcuggaagcugugcuugagcaacaugggucccagccuagcaacucuuacccguccauuaucagcgacucuagcgcccuggaagaucuccggaaucccgagcaguccaccucugagaaagcgguucugacaagccagaaguccagcgaauauccuaucucucaaaaccccgagggacuguccgccgacaaauuugaagugagcgcugauucuuccaccagcaagaauaaagagccuggcgucgaacgcuccucucccagcaagugcccgucccucgacgauagaugguacaugcacucuuguagcggcucccugcagaaccggaacuauccuagccaggaggagcuuauuaaggugguggacgucgaggaacagcaacuggaagagucugggccccaugaccucacggagacauccuaccugccucgccaggaucuugaaggaacccccuaccuggagagcggcaucucucucuucuccgacgaucccgaaagcgacccuucugaggauagagccccggaaagcgcucggguugggaauauucccuccagcacaucugcccugaaagugccucagcugaagguggcggaguccgcccagagccccgcugccgcucacaccaccgacacagccggauauaacgccauggaggaauccgucucucgcgagaaaccugaacucacggcuagcaccgagagagugaauaagcggauguccaugguugugucuggccugacacccgaagaguuuaugcuugucuacaaauucgcgagaaagcaccauaucacccugacaaaccucauuaccgaggaaacgacacacgugguuaugaagaccgaugccgaguuugugugcgaacgcacccugaaauauuuccuggggaucgcuggaggcaagugggucgugagcuacuuuugggucacacaauccaucaaagagcggaagaugcuuaaugaacaugacuucgaggugagaggcgauguugugaacgggcgcaaucaccagggaccgaaacgggccagagagucucaggaccgcaagauuuuucggggccucgaaaucugcuguuaugggccuuucaccaacaugcccacagaucaacuggaguggaugguccagcugugcggagccagcgugguuaaggaacucuccagcuucacgcugggcaccggggugcacccuauugucguggugcagcccgacgcuuggacagaggacaauggauuucaugccaucggccagaugugugaggcgccuguugucaccagagaaugggugcuugauucuguggcucuguaccaaugccaggagcucgacacauaucugauuccccagaucccgcacucccauuacuga

SEQ ID NO: 3069 - RNA, 546 nt, Artificial Sequence
  AAC72302 variant
augcugcucgagcccggcagagggugcugugcccuggcuauccuucuggccauuguggacauccagagcggaggcugcauuaacaucaccuccucugcgagccaagaagggacacggcucaaucugauuuguacggucuggcacaagaaagaggaagcugagggauucguuguguuucuuugcaaggaucgcuccggcgacuguucuccugaaaccagccugaaacagcucagacugaagcgggauccggggaucgacggagugggcgagaucuccucucagcugauguucacaauuagccaggucacaccccuccauuccggcaccuaccaaugcugugcccgcagccagaaaucugggaucagacugcagggacacuuuuucuccauucuuuuuaccgagacaggcaacuauaccgugacggggcugaagcagcggcaacaucucgaguucagccacaaugaaggaacccugucuuccggcuuucuucaggaaaagguuugggugaugcuggucacaagccucguggcccugcaggcucuguga

SEQ ID NO: 3070 - RNA, 639 nt, Artificial Sequence
  BAG58223 variant
augcugcucagcguguacuucaaggagcaguuucuggacggcgauggguggaccuccagauggaucgaaucuaaacacaagagcgacuucggaaaauuuguccuuuccucuggcaaguucuauggggaugaggaaaaagacaagggacugcaaacaagccaggaugcccgguuuuacgcucucuccgccucuuucgagcccuuuagcaacaagggccagacgcugguugugcaguucaccgugaaacaugaacaaaauauugacugcgggggaggcuaugucaaacuuuuuccuaacucccuggaucagacagacaugcacggcgauagcgaguacaauaucauguucgggccggacauuuguggacccggcaccaagaaggugcauguuaucuuuaacuauaaagggaagaaugugcucauuaacaaggauauccgcugcaaagacgaugaguucacacaccuguacacccugaucgucagaccugacaauacauaugaagugaagauugacaacucucagguugaguccggaagccucgaagaugacugggauuuucugcccccuaaaaagaucaaagaccccgaugcgucuaagccugaggacugggaugagcgggcuaaaauugacgauccguga

SEQ ID NO: 3071 - RNA, 891 nt, Artificial Sequence
  BAG65301 variant
augcacggcgacagcgaguacaacaucauguucgggcccgauauuugcggaccuggcaccaagaaagugcaugucaucuuuaauuauaaggggaaaaacguucugauuaauaaggacaucagauguaaagaugacgaguucacacaccucuacacgcugauugugcggccggauaacaccuaugaagugaagaucgacaauucccaggucgaaucuggaagccuugaggaugacugggauuuucugcccccuaagaaaaucaaggaccccgaugccuccaaaccugaagacugggaugagcgcgcuaagauugacgaccccacagauucuaaaccugaggacugggauaagccggaacauauccccgacccugaugccaagaaacccgaggacugggaugaagagauggacggcgagugggaaccucccgugauucaaaacccggaguacaagggggaauggaaaccuagacagaucgauaaucccgacuauaagggaaccuggauucacccugagaucgauaaccccgaauacagccccgacccuuccauuuaugcguacgacaauuucggcguucucggccuggaucuuuggcaagugaaaucugggacaaucuuugacaacuuccugaucaccaaugaugaggcuuacgccgaggaauuuggaaacgagacauggggcgucaccaaggccgcugaaaaacagaugaaggacaagcaggaugaggaacagcggcucaaagaggaggaagaggacaagaaacgcaaggaagaggaagaggccgaggauaaagaagacgaugaggacaaggaugaagacgaggaggaugaagaggacaaggaagaggacgaagaggaggaugugccggggcaggcuaaagacgaacuguga

SEQ ID NO: 3072 - RNA, 1254 nt, Artificial Sequence
  AAA36582 variant
augcugcucagcgugccccugcuucugggccuccuggggcuugccgucgcugagccugccguuuacuucaaggaacaguuucuggacggagauggcuggaccuccagauggaucgagucuaaacacaagagcgacuucgggaaauuugugcucuccucuggaaaguucuauggcgaugaagagaaagacaaggggcugcaaacaagccaggaugcgcgguuuuacgcucuguccgccucuuucgaaccguuuagcaacaagggacagacgcucgugguccaguucaccgugaaacaugagcaaaauauugacugcggcggcggguauguuaagcuguuucccaacucccuugaucagacagacaugcacggagauagcgaguacaauaucauguucggcccugacauuugugggcccggaaccaaaaaggugcaugucaucuuuaacuauaaaggcaagaaugugcugauuaacaaggauauccgcugcaaagacgaugaguucacacaccucuacacccugaucguuagaccugacaauacauaugaagugaagauugacaacucucaggucgaauccgggagccuugaggaugacugggauuuucugcccccuaaaaagaucaaagacccggaugccucuaagcccgaggacugggaugaacgggcuaaaauugacgauccuaccgacuccaagcccgaggauugggacaagccugaacauauccccgacccggaugccaaaaagccugaggacugggaugaagagauggacggagagugggaacccccugugauucagaaucccgaguacaaaggcgaauggaagccccgccaaaucgauaacccugacuacaaaggcacguggauucacccggagaucgauaaucccgaauauagcccugaccccucuaucuacgcuuaugauaacuucggggugcucggacuggaccuguggcaggucaaguccggcaccauuuucgauaauuuucucaucacaaacgacgaggccuacgcggaggaguucgggaaugaaaccuggggaguuacaaaggccgcugaaaaacagaugaaggauaaacaggacgaggaacaaagacugaaggaggaggaagaggacaaaaagcggaaggaagaggaggaagccgaggauaaagaagacgaugaggacaaggaugaagacgaggaggaugaagaggacaaagaagaggaugaagaggaggacgugccuggccaggcuaaggaugaacuuuga

SEQ ID NO: 3073 - RNA, 1155 nt, Artificial Sequence
  BAB71655 variant
auggccagagcucuggugcagcucugggccaucugcaugcugcgggucgcgcuugcuaccguuuacuuccaagaggaauuucuggacggcgagcacuggcgcaacagauggcuccagagcacaaaugauucccgguucgggcauuuucgccugucuagcggaaaguucuauggccacaaagaaaaggacaaagggcuucagacgacccagaacggaagauuuuacgccauuuccgcccgguucaagcccuuuucuaauaaaggcaagacacuggugauccaauauaccgugaagcaugagcagaaaauggauugugggggaggcuacauuaaggucuucccugcugacaucgaucagaaaaaccucaauggcaagagccaguauuacauuauguuugggccggacaucugcggauucgauaucaaaaaggugcacguuauucugcauuuuaagaacaaauaucacgaaaauaagaaacugauccgcuguaagguggacggcuucacacaccucuacacccugauucuuagacccgaucuguccuacgacgucaaaaucgaugggcaaucuauugagagcggauccaucgaguaugacuggaaccucacaagccugaagaaagaaaccucuccugccgaguccaaggauugggaacagacgaaggacaauaaagcucaggacugggagaagcauuuucuugaugccagcaccucuaaacaguccgacuggaacggcgaucuggacggggauuggcccgcgccuaugcuccaaaagcccccuuaccaggacggacugaaaccggagggcauucacaaggauguguggcugcaucggaagaugaaaaauacagacuaucucacccaguacgaucugagcgaguucgagaacaucggcgccaucgggcuugaacuguggcaaguucgcucuggaacaauuuucgacaauuuucucaucaccgaugacgaggaauaugcugacaacuucggcaaggccacguggggagagacaaaagggcccgagagagaaauggaugcuauucaggccaaggaggaaaugaaaaaggcgcgggaggaagaggaggaagaacugcuuuccggcaagaucaaucgccacgaacacuacuuuaaccaguuccauagacggaacgagcuguga

SEQ ID NO: 3074 - RNA, 330 nt, Artificial Sequence
  CAA10193 variant
augcugauggcccaggaggcucucgccuuccugauggcgcaaggcgcuaugcuugccgcccaggaaagacgggugccccgcgcugccgaggucccuggggcucagggacagcaaggcccgagagggcgggaagaggcgccccgcggaguuagaauggccgugccucugcuccggcgcauggaaggcgcccccgcugggccuggaggcagaaccgccgcuugcuuuagcuguacaucccggugccugucucgcagacccuggaagcggagcugguccgccggcucuuguccugggaugccgcaccuuagccccgaccagggacgcuucuga

SEQ ID NO: 3075 - RNA, 1440 nt, Artificial Sequence
  CAA66853 variant
auggacuucagcagaaaccuguacgauaucggcgagcagcucgacuccgaagaucuggccucucuuaaguuucugagccucgacuauauuccccaacggaaacaggagccuaucaaggaugcucugaugcuuuuccagcgccugcaggagaaaagaaugcucgaggaauccaaucugucuuuucugaaggagcuccuguuccggauuaaccgccuugaccugcucaucaccuaccugaauacaagaaaagaggaaauggagcgggaacuucaaacgccggggcgcgcccagauuagcgcguauagagugaugcuguaccagaucuccgaggaggucucucggagcgaacuccgcuccuuuaaguuccugcugcaggaggaaaucagcaagugcaaacucgaugacgauaugaaccugcuugacauuuuuaucgagauggaaaagagaguuauucugggagagggcaaacucgauauccugaagcgggugugugcucaaauuaauaaaucucuucugaagaucauuaacgacuaugaggaguucuccaaggagcgcagcagcucccucgaagggagccccgaugaguuuucuaauggagaagaacugugcggcgugaugaccaucuccgacagcccuagagagcaggacuccgaaucucagacacuggauaaagucuaccagaugaagucuaaaccccggggguauugucucaucauuaacaaucacaacuucgccaaggcccgcgagaaagugccuaagcugcauuccaucagagaccggaauggaacccaccuugaugcuggcgcccugacaaccacauuugaagaacuccauuucgaaauuaaaccccacgacgauugcaccguugagcaaaucuacgagauucugaagaucuaccagcuuauggaccauagcaacauggauuguuuuaucugcuguauucugucucacggcgacaaggggaucauuuauggaacggauggccaggaagcuccuaucuacgagcucaccucccaauucacagggcugaaaugcccgagccuggccggaaagcccaaaguguucuuuauucaggcgugucagggcgacaauuaucagaaggggaucccugucgaaaccgauucugaggagcaacccuaccucgaaauggaccugagcuccccucagacaagauauauccccgacgaggccgauuuccuucugggaauggcuaccgugaacaauugcguuucuuaccgcaacccggccgaaggcacgugguauauucagagccucugucagucccugcgggagagaugcccucgcggcgacgauauccugacaauucuuaccgaagugaacuacgaggucagcaauaaagacgauaagaagaacauggggaaacaaaugccccagccuacauuuacccuccggaagaaacugguguuccccucugacuga

SEQ ID NO: 3076 - RNA, 1569 nt, Artificial Sequence
  CCDS2340.1 variant
augaaaagccagggccaacacugguacuccucuagcgacaaaaacugcaagguguccuucagagagaaacugcucaucauugauucuaaucuggggguccaggacguugaaaaccuuaaguuucuguguaucggacucgugcccaauaaaaagcuggaaaagagcuccucugccagcgauguguucgagcaucuucuggcugaggaccuccuguccgaagaggauccguuuuuccuggccgagcuccuguauauuauccggcagaaaaagcugcuucagcaccucaacugcaccaaagaagaggucgaacgccugcuuccuacaagacaacgggugagccuguuucgcaaucuccuguacgagcugucugagggcauugacuccgaaaaccucaaggauaugaucuuccugcuuaaagacagccugcccaagacggagaugaccucucucuccuuucuggcguuccuugaaaagcaggggaaaaucgaugaggacaaucugacaugucucgaagaucugugcaagaccguugugccuaaacugcucagaaacauugagaaguauaaacgggagaaggcuauccagauugucacacccccuguggacaaagaagccgagagcuaccagggagaagaggaacugguuucucaaaccgaugugaagacauuucuugaggcccugccccaggaguccuggcagaauaagcaugcuggcagcaacgggaaucgcgccaccaacggagcuccuucccucgucucuagaggcaugcagggcgccagcgcgaauacgcugaacuccgaaaccagcacaaaacgggccgcuguguaucgcaugaauagaaaccaccgggggcuuugugugaucgucaacaaucauucuuucaccucccugaaggaccgccaaggaacacacaaagacgccgagauucucagccacguuuuucaguggcugggcuucaccgugcauauccacaacaaugugacgaaggucgaaauggagauggugcugcagaaacaaaagugcaacccggcucaugccgauggggacuguuuuguuuucugcauucucacacacggaagauucggcgcgguguacucuagcgaugaagcccugauccccauccgggagauuaugucccacuuuaccgcccuucaguguccucgccuggcugagaagcccaaacucuucuuuauccaggcuugccagggggaagagauucaaccuucugucagcaucgaagccgacgcccugaaucccgagcaggcuccgacaucccugcaggauagcauuccugcggaggccgacuuccuucucggacuggcuaccgugcccggcuauguuucuuuuagacauguggaagagggcuccugguacauccagagccuguguaaccaccucaagaaacuggucccucggcaugaagauauccuuucuauucugaccgccgugaaugacgaugucuccagacgcguggacaagcaagggacaaagaagcagaugccccagcccgccuucacgcuccggaagaaacugguuuuuccugugccgcuggaugcucuuagccucuga

SEQ ID NO: 3077 - RNA, 1020 nt, Artificial Sequence
  EAW65632 variant
auguggcagcugugggccagccucugcugucugcuugugcuggcuaacgccagaucccggcccucuuuccacccucucagcgacgagcuggucaauuacguuaacaagcgcaauaccacauggcaagcgggccauaacuuuuauaauguggauauguccuaccuuaaaagacugugcgggacguuccucggaggcccgaagcccccucagcgggugauguuuaccgaagaccugaaacugcccgcuucuuucgaugcccgcgagcaguggccucagugucccacaaucaaggaaauuagagaccaagggagcugcggauccuguugggccuuuggcgcugucgaggccaucucugaucggauuugcauccacaccaacgcucaugugagcguugaaguguccgccgaggaccuccugacauguugcgggagcauguguggagauggcugcaauggcggguauccugcggaggccuggaacuucuggacccgcaaaggacuugucucuggcgggcuguacgaaucccacgugggauguagaccguauagcauucccccuugcgagcaucacguuaauggcucucggcccccuugcacaggggaaggagacacccccaaguguuccaagaucugcgagccgggcuacagcccuacguauaaacaggauaagcacuacggcuacaacucuuauuccgugagcaauuccgagaaagacaucauggcugaaauuuacaagaacgggcccgucgagggagccuuuucuguguauagcgauuuccuccuguacaaauccggcguguaucagcaugucaccggggaaaugaugggaggccacgcuauccgcauucuuggguggggaguugagaauggcacaccuuacuggcugguggccaacagcuggaauaccgacuggggcgauaacggguuuuucaagauccucagaggacaggaccauuguggcauugaaucugagguggucgcggggaucccccggacagaccaauauugggagaagauuuga

SEQ ID NO: 3078 - RNA, 1020 nt, Artificial Sequence; identical to SEQ ID NO: 3077
  AAC37547 variant

SEQ ID NO: 3079 - RNA, 1002 nt, Artificial Sequence
  EAW62731 variant
augaaccccacccugauccucgccgcuuucugccugggcauugccagcgcgacacuuacguuugaccacucccuggaggcucaguggaccaaguggaaagccaugcauaauagacucuacgggaugaacgaagagggauggcggcgcgccgugugggaaaagaauaugaaaaugaucgagcugcacaaccaagaauauagagagggcaagcauucuuucacaauggcuaugaaugccuuuggggauaugaccagcgaggaauuucggcaggucaugaacggauuucagaaucgcaaaccuagaaagggcaagguuuuccaggagccgcuuuucuacgaagcuccccgguccguggacuggcgcgagaaaggguaugugacaccugucaagaaccaaggacaguguggcucuugcugggccuucagcgcgaccggcgcccuggaggggcagauguuuagaaaaacaggacggcucauuucccugucugaacagaaucugguggauuguagcggcccccaagggaacgagggaugcaauggcgggcucauggacuacgcuuuccaguauguucaggauaacggaggccuggacuccgaagagagcuacccuuaugaagccaccgaggagucuuguaaguacaaucccaaauacuccguggcuaacgauacgggcuuugucgacaucccuaagcaggaaaaggcccuuaugaaagcgguggccaccguugggccgauuagcguggcuaucgaugccggacacgagucuuuccuguuuuauaaggaaggcaucuacuucgagcccgacugcuccagcgaagauauggaccaugggguccucguggugggauauggcuucgagucuacagaguccgauaauaacaaauacuggcuggucaagaacagcuggggagaagagugggggaugggcggcuauguuaaaauggcuaaggaccgcagaaaucacugugggauugccuccgccgcuucuuacccuaccguguga

SEQ ID NO: 3080 - RNA, 1002 nt, Artificial Sequence; identical to SEQ ID NO: 3079
  AAA66974 variant

SEQ ID NO: 3081 - RNA, 456 nt, Artificial Sequence
  AAG17239 variant
auggacuacgccuuccaguaugugcaagauaacggcgggcuggacagcgaggaauccuaccccuaugaggcuaccgaagagucuugcaaguacaauccuaaauauagcgucgccaacgauacaggauuuguugacaucccgaagcaggaaaaagcgcucaugaaggcuguggccacggugggccccauuuccgucgccaucgaugcugggcacgagucuuuccuguuuuacaaagagggaauuuauuucgaaccugacuguagcuccgaggauauggaccauggcgugcuuguugugggguacggauuugaaucuaccgagagcgauaauaacaaguacuggcuggucaaaaauuccuggggcgaggaauggggcaugggaggguaugugaagauggccaaggacagacggaaccacugcggcaucgcuagcgccgcgucuuaccccacaguuuga

SEQ ID NO: 3082 - RNA, 984 nt, Artificial Sequence
  AAA51932 variant
augcuguuccuccugcuuccccugcucgccgugcugccuggcgacgggaacgcugauggacuuaaggagccgcugagcuuucacgucaccuggaucgccuccuucuacaaucauucuuggaaacagaaccucguuagcggcuggcuguccgaccugcaaacacacacgugggauucuaauagcuccaccauuguguuucucugccccuggucuagagggaacuucagcaaugaagaguggaaggaacuggagacacuuuuucggauccgcaccauuagauccuucgaaggaauccggcgcuaugcgcaugagcugcaguuugaguacccuuucgaaauucaggugacaggcgggugugagcuccacagcggaaaagucucuggcuccuuucugcagcuugcuuaucaaggcagcgacuucgugucuuuucagaacaauuccuggcugcccuacccuguugccgggaacauggccaagcauuucugcaaagugcucaaucagaaccagcacgaaaaugauaucacccacaaccugcugagcgacacaugucccagauuuauccucggacugcuugaugcuggcaaggcccaucugcaacggcaggucaagccugaggcuuggcucucucacgggccgucccccggaccuggccaucugcagcuugugugccacguuagcggguucuaucccaaaccugugugggucauguggaugcgcggagagcaggaacaacagggcacccagagaggcgacauucugcccuccgccgaugggacgugguaccuccgggcgacccuggagguggccgcuggagaagccgcugaccugucuugucgcgugaagcacagcucccucgagggccaagauaucguccuguauugggaacaucacagcucuguuggguucauuauccuugccgugauugugccgcugcuccugcuuaucggacuggcgcucugguuuagaaaacggugcuucuguuga

SEQ ID NO: 3083 - RNA, 1002 nt, Artificial Sequence
  AAA51939 variant
augcugcuccugcccuuccagcuucuggccgugcucuuuccuggcgggaacagcgagcacgcuuuccaaggaccgaccuccuuucaugucauccagacaucuagcuucaccaauuccacgugggcccagacacagggcucuggguggcuggacgaucuucaaauucacggaugggacagcgauuccggcaccgcgaucuuucugaagcccuggucuaaagggaacuucagcgacaaggaaguugcugagcucgaagagauuuuuagaguguacaucuucggauuugcccgggaagugcaggauuucgccggcgacuuucagaugaaauauccuuucgagauucagggcaucgcugggugcgagcugcauuccggaggcgccaucgucagcuuucugcgcggggcucucggaggccuggauuuccuuucugugaagaaugccuccuguguucccagcccugaagggggaucuagagcgcaaaaauucugcgcccugauuauccaguaccagggcauuauggagacagugcggauccuccuguaugaaaccuguccccgcuaccuucugggcguccucaacgcugggaaggccgaccugcagagacaagugaagccugaggcuuggcuguccagcggaccgucucccggcccugggcggcuccagcugguuugccacguguccggauuuuaucccaaaccugucugggugauguggaugcgcggcgagcaggaacaacaggggacacagcuuggagauauucugcccaaugccaacuggaccugguaccucagagcgacgcuggacguggccgauggcgaggcugccggccuuagcugucgggucaagcauuccucucuggaagggcaggacaucauucucuauuggcgcaauccgaccagcaucggauccaucguucuggcuauuaucgugccuagccugcuccugcuucugugccucgcccugugguacaugagacggcgcucuuaccaaaacauucccuga

SEQ ID NO: 3084 - RNA, 1002 nt, Artificial Sequence
  AAI26466 variant
augcuguuccuccaguuucugcuucuggcccuccugcuucccggcggggacaacgcugaugccagccaagagcacguguccuuccaugucauccagaucuuuucuuucguuaaucagagcugggcgagaggacagggcuccggguggcuggacgaacuccaaacccacggaugggauucugagagcggcacaauuauuuuucugcauaacugguccaaggggaauuucucuaacgaggaacugagcgaccucgaacugcuuuuucgguucuaccuguuuggacucacgcgcgagauccaggaucacgcuucccaggacuauagcaaauacccuuucgagguccaggugaaggccggcugcgaacugcauucuggcaaauccccggagggguuuuuccaaguggccuuuaauggacuugaucugcucagcuuccagaacaccacaugggugcccucuccuggcugugggucccuggcucagagcguuugccaucugcucaaucaccaguaugaaggagugaccgagacagucuacaaccugauuagaucuaccuguccccgguuccuucugggccuccuggacgccgggaagauguaugugcaccgccaaguuagaccugaggcuuggcuuuccagccggcccucccugggaucuggccagcuccugcuggugugccacgccagcggcuuuuacccuaaaccggucugggugacauggaugcgcaaugaacaggagcaacucgggaccaagcauggagauauccugcccaacgcggacggcacgugguaucuucaggugauccuggaagucgccuccgaggaaccugcugggcucagcuguagaguucggcacucuucccugggaggccaggauauuauccuuuacugggggcaccauuucagcaugaauuggauugcccugguggugaucgucccccucgugauucugaucguucuggugcucugguuuaagaaacacugcucuuaccaggacauucuguga

SEQ ID NO: 3085 - RNA, 1008 nt, Artificial Sequence
  AAA59672 variant
augggcugccuccuguuccugcuucugugggcccuccugcaggcuugggggagcgccgaggugccccaaagacuuuuuccucugcggugucuccagaucuccucuuucgcgaacagcuccuggacccgcacagacggacuggcuuggcugggcgaacuccagacgcacucuuggagcaaugauuccgacaccgucagaucucugaagccguggagccaggggacauuuuccgaucaacagugggagacccuucagcauauuuuccggguuuaccgcagcucuuuuacaagagacgugaaagaguucgccaagaugcugcggcucuccuauccccuggaacuucaggugagcgccggaugcgaaguccacccuggcaacgcuucuaauaacuuuuuccauguggccuuucaagggaaagauauccuguccuuccagggaaccagcugggagcccacacaggaggcuccucucuggguuaaucuggccauucaggugcugaaccaagacaaguggacccgcgaaacgguccaguggcuccugaauggcaccuguccccaguuugugucuggccuucuggaguccgggaaaagcgaacucaagaagcaaguuaaaccuaaggcguggcuguccagaggaccgucucccggcccugggcggcuucugcucgugugccacgucagcggauucuaccccaaaccugugugggugaaguggaugcgcggcgagcaggagcagcaggggacacaacccggagauauccugccgaacgccgacgaaaccugguaucugagagcuacacucgaugucguugccggcgaggcugccggccuguccugucgggugaaacauagcucucuugaagggcaggacauugugcuguacuggggaggcuccuauaccagcauggggcucaucgcgcuggccguccuugcuugccugcucuuucugcugaucgugggauucacgucucgcuucaagagacagacaagcuaccagggcguucucuga

SEQ ID NO: 3086 - RNA, 1167 nt, Artificial Sequence
  EAW52830 variant
augcugcuccuguuccuucuguuugagggccucugcugucccggggaaaacaccgccgcuccucaggcccugcaaagcuaccaccuugcggcugaggaacagcuguccuucagaaugcuccagacaucuagcuuugccaaucauuccugggcccacucugagggaagcggcuggcugggggaccugcagacgcauggaugggauaccgugcucggcacaauccgguuccugaagccguggucccacgggaacuuuucuaaacaagaacuuaagaaucugcagagccucuuccagcuguauuuucauuccuucauucagaucguccaagcuagcgccggacaguuucagcuugaguaccccuucgagauucagauccuggcuggcugccgcaugaacgccccucaaauuuuucucaauauggcguaucagggcucugacuuccuguccuuucaggggaucagcugggaacccucuccuggagccggcaucagagcucaaaacauuuguaaaguucugaaucgguaccucgauaucaaggagauucugcagucccuucuggggcauaccugcccccgcuuccucgccggacugauggaagcuggcgagagcgagcuuaaaagaaaggugaagccugaagccuggcugucuugugggccgucccccggaccuggccggcuccagcuggugugccacgucagcggcuucuaucccaaaccuguguggguuauguggaugcgcggggagcaggaacaaagaggaacacagcggggcgacgugcugcccaacgcggaugagaccugguaccuccgcgccacacuggacgucgcugccggggaagcugccggacuuuccuguagagugaagcacucuagccugggcgggcacgaucucaucauucauuggggaggcuauuccaucuuucugauucuuaucugccugaccguuaucgugacgcucgucauucuggugguggucgacagccggcugaaaaagcagucuuccaauaaaaacauccucagcccgcacaccccuucucccguuuuccugaugggcgccaauacacaggauaccaagaacagccgccaccaauuuugucuugcucagguguccuggauuaagaauagagugcugaaaaaguggaaaacacggcucaaccagcugugguga

SEQ ID NO: 3087 - RNA, 894 nt, Artificial Sequence
  AAA35581 variant
augaccacacccagaaacagcgugaauggcacguucccugccgagccgaugaaggggcccaucgcuaugcaguccggaccuaaaccccuguuucggcgcaugucuagccucgucggcccuacccaauccuucuuuaugagagaaucuaagacacugggggccguucagauuaugaacggacuuuuccacaucgcgcugggcgggcuccugaugauucccgcuggaaucuacgccccuauuugcgugaccgugugguauccgcuuuggggcggcaucauguacaucauuagcgggucccugcucgccgcuacagagaaaaauucucggaagugucuggucaaaggaaagaugaucaugaacagccugucccucuuugccgcuauuagcggcaugauccugucuauuauggacauccuuaauauuaagaucucccauuuccugaaaauggaaagccucaacuuuauccgcgcccacacccccuauauuaauaucuacaacugcgagccugcgaaucccucugaaaagaacuccccuagcacacaguauuguuacucuauucagucccuguuccuugggauccugagcgugaugcucauuuuugccuucuuucaagagcugguuaucgcuggaaucguggagaaugaauggaaaagaaccugcucccggcccaagucuaacauuguccugcucagcgccgaggagaaaaaggaacagacgaucgagauuaaggaagaggugguuggccugaccgaaacauccagccagccgaaaaaugaggaagauaucgagauuaucccuauccaggaggaagaggaagaggaaaccgagacaaacuuccccgagccuccccaagaccaggaaucuucccccauugagaaugauagcucuccuuga

SEQ ID NO: 3088 - RNA, 1989 nt, Artificial Sequence
  AAC18956 variant
auggagagcaagaccgaaaaauggauggagagaauccaccugaacguguccgaacggcccuucccuccgcauauucagcuucccccugagauccaagaaucucaggaggucacacugacgugccuucugaauuuuagcuguuacggcuaucccauucagcuccaguggcugcuugaggggguuccuaugcgccaagccgcugugaccuccacaucucugaccaucaagagcguguucacaagauccgaacucaaauuuucuccccaguggagccaccauggaaagauugugaccugccagcugcaggacgccgauggcaaauuccuguccaacgacacagugcaacucaauguuaagcacaccccuaagcuggagaucaaagugacgccgagcgaugcgaucguccgggaaggggacucugugaccaugacaugugagguuuccagcaccaaccccgaguacacaaccgugucuuggcuuaaggauggaacgucccugaaaaagcagaauacauuuacccucaaccugcgcgaagucacaaaagaccagagcggcaaguauugcugucaggugucuaaugauguggggccuggaagauccgaggaagucuuccuucaaguucaguacgcucccgagccuagcaccgugcagauucugcauucccccgccguggaaggcucucaagucgaguuucucugcaugagccuggccaacccgcugccuaccaauuauacaugguaccacaacggcaaggagaugcaggggcggacggaagagaaagugcacauccccaagauucucccuuggcaugcuggaaccuauuccuguguugccgaaaauauccugggcacagggcagcgcggacccggcgcugagcuugacgugcaguaucccccuaaaaaggucaccacagugauucaaaacccgaugcccaucagagaaggggauaccguuacgcugagcugcaauuacaacucuuccaauccuagcgugacacgguacgaguggaaaccccacggagccugggaggaaccuucucucggcguccugaagauucagaaagugggcugggacaacaccaccaucgcgugugcccgcugcaacagcugguguuccugggcuucucccgucgcccuuaaugugcaguacgcuccgagagauguucgggugcgcaagaucaagccucugagcgagauucauuccgggaacagcgucucucuccagugcgacuucuccagcucucaccccaaagaagugcaauuuuucugggagaagaauggaagacugcugggcaaagaaucccagcucaacuuugauagcaucuccccugaggacgccgggucuuauagcugcuggguuaauaacuccauuggacagacagcgucuaaggccuggacccuggaggugcuuuacgcuccccggcgccugagagucagcauguccccuggcgaccaggugauggaagggaaaagcgccacacuccggugugagucugaugcuaaucccccggugucccacuauacgugguucgacuggaacaaucaaagccugccuuaccauucucagaagcucagacuggaacccguuaagguccagcacuccggagccuauuggugccagggcaccaacagcgugggcaaagggcgcucuccccucagcacacugaccguguacuacuccccugagacaaucggacggagagucgccgugggccuggggagcugucucgcuauucugauccuugcgaucugcggacugaagcuccaacgccgggaugccgagucuuccgaaaugcagagaccgccccgcaccugugacgauacgguuaccuauagcgcucugcauaaacggcaggucggcgacuacgagaaugucauuccugauuuucccgaagacgaggggauccacuauuccgaacugauucaauucggcgugggagagagaccucaggcccaggagaacguugauuacgugauccuuaagcauuga

SEQ ID NO: 3089 - RNA, 2544 nt, Artificial Sequence
  AAB06448 variant
augcaucugcucggccccuggcugcuucugcucgugcuggaguaccuugccuucagcgacuccucuaagugggucuuugaacacccugagacccuguaugcuugggaaggggccugcguuuggaucccguguacauacagagcgcucgauggagaccuggagagcuucauucuguuucacaaccccgaauauaauaaaaacacguccaaguucgauggcacccggcucuacgagucuacaaaagacgggaaggugccuagcgagcagaaacgcgugcaauuucugggagauaagaauaagaacugcacccuuuccauccaucccguccaccugaaugacucuggccagcucgggcugagaauggaaagcaaaacagagaaguggauggaacggauucaucuuaacguguccgagcgcccuuuucccccucacauccagcugccgcccgagauucaggaaagccaagagguuacccucacaugucugcugaauuucucuugcuauggauacccuauccagcuccaguggcugcuugaaggcgugcccaugagacaggcugccgucaccuccacgagccugaccaucaaaucuguguucacacgguccgagcucaaguuuagcccucaauggucucaccauggcaaaauuguuaccugucagcugcaggaugccgacgggaaguuccuuuccaacgauacagugcagcugaaugucaagcacacccccaaacucgaaaucaaggugacgccgagcgacgcuauugugcgcgagggagauuccgucacaaugaccugcgagguuucuagcuccaacccugaauauacaaccgugagcuggcugaaagacggcaccucucugaagaaacaaaauacauuuacgcucaaccugagagaggugaccaaggaucaguccgggaaauacuguugccaggucagcaaugacgugggacccggccggucugaagagguuuuccuucaagugcaguacgccccugaacccagcacaguccagauccugcauucccccgcuguggaggggucucagguugaguuucucuguaugagccuggccaacccucuuccgaccaauuauacaugguaccacaacggaaaggaaaugcaaggccgcaccgaggaaaaggugcacauucccaaaauccugccuuggcaugcgggcacguauuccugcgucgccgagaacauucucgggacaggacagagaggccccggggcugaacuggacgugcaguacccucccaagaaagucaccaccgugauccagaauccgaugccuauccgggagggagauacaguuacccugagcuguaacuauaauucuuccaaccccagcgugacacgcuacgaguggaagccucacggcgccugggaggaacccucucucgggguccugaaaauucaaaaugugggaugggacaacacgaccaucgcuugcgccgcgugcaauuccugguguagcugggccuccccuguugcucuuaacgugcaguaugcccccagagauguccgggugcgcaagauuaagccgcugucugaaauccauagcggcaauuccgugucucuccagugcgacuucagcuccagccacccuaaagagguucaguucuuuugggagaagaacggcagacugcuggggaaagaaucucaacuuaauuucgauuccauuagccccgaggacgcuggaucuuacuccuguugggucaacaauagcaucggccagacagccucuaaggccuggacccucgaagugcuguacgcuccccggagacugcgcgugagcauguccccuggggaucaggucauggagggaaaaagcgcgacacuuaccugcgaaucugacgccaacccgcccgugucccauuauacgugguuugauuggaauaaccagagccugccuuaccacucccaaaagcuccggcuggagcccguuaaggugcagcacucuggcgcuuauuggugucaggggaccaacagcgucggcaaaggaagauccccucucucuacacugaccguguacuauagccccgagacaaucggccgccggguugccguggggcugggauccugccuugccauucucauccuggcuauuuguggccugaagcuccaaagacgcuggaaacggacccagucucagcaggggcugcaagaaaauagcuccggacagagcuucuuugucagaaacaagaaagugcgccgggccccucuuucugagggcccccauucccuggggugcuacaauccgaugauggaagacggcaucagcuauacgacacucagauucccugagaugaacauuccccgcaccggagaugcggaaucuuccgagaugcagcggccucccccggacugugacgauacaguuaccuacagcgcucugcacaagagacaggugggcgacuacgagaaugucaucccugauuuucccgaagacgaggggauccauuauucugaacugauucaauucggagugggcgagcggccucaggcccaggaaaacguggauuacgucauccuuaagcacuga

SEQ ID NO: 3090 - RNA, 2544 nt, Artificial Sequence; identical to SEQ ID NO: 3089
  ABK41939 variant

SEQ ID NO: 3091 - RNA, 1605 nt, Artificial Sequence
  CAE47548 variant
augcugagacggcgcggcagccccgggaugggagugcacgucggcgccgcucucggggcccugugguucugccuuaccggagcgcuggagguucaggugccugaagacccgguggucgcucucgugggcacagaugccacgcuguguugcuccuuuucucccgagccuggguucagccuugcccaacugaaccucaucuggcagcugaccgacacaaagcagcugguucauuccuuugcugaaggacaggaucaaggcucugccuacgcuaauagaaccgcccucuuccccgaccugcuugcgcagggcaacgccagccugcggcuccagcgcgugagagucgcugaugagggguccuuuacauguuucgugucuauucgggacuuuggaagcgccgcuguuucccuucagguggccgcgccuuauagcaaacccucuaugacccuggaaccuaauaaggaucugcgcccgggcgacacagucaccaucacgugcuccagcuaccaaggguaucccgaggccgagguguucuggcaggauggacagggcgugccucucaccgggaacgucacaaccucucagauggcuaaugaacaaggacuguuugacguucacuccauucugagaguggugcucggcgccaacggcacauacagcugucugguccggaaucccgugcuucagcaggaugcucauucuuccguuaccaucacgccucaacgcagccccacaggggccguggagguccaggugccggaagacccuguuguggcccuggucggaaccgaugcuacacucagaugcuccuucucucccgagccuggcuuuagccuggcgcagcuuaaccugauuuggcagcucaccgacaccaaacaacuggugcacuccuucacagaggggcgggaccagggaagcgccuaugcuaaucgcacggcccuguuucccgaucuccuggcccagggcaacgcuucucuuagacugcagcggguccgcguggccgacgaaggguccuucaccuguuucguuagcaucagagauuuuggaucugcggcugugagccuccaagucgccgcccccuacuccaagccuucuaugacacuggagccgaauaaagaccuucggcccggcgauaccgugacaauuaccugcagcuccuauagaggcuacccugaagcugagguuuucuggcaggacgggcagggagugccccugacgggcaacgucacaaccagccagauggccaaugaacaagggcucuuugaugugcauucugugcugcgcguuguccugggagcuaacggcaccuacuccugucucgugcggaauccugugcugcagcaggacgcccacgggagcgucacaaucaccggccagcccaugacauucccgccugaggcgcuuugggugacgguuggacugucugugugccucaucgcccugcuggucgcucuugccuuuguguguuggagaaagauuaagcaauccugcgaggaagagaacgcuggcgccgaagaucaggacggggagggagaaggcagcaaaaccgcgcuccagccccugaagcacuccgauucuaaagaggacgacgggcaagagaucgccuga

SEQ ID NO: 3092 - RNA, 639 nt, Artificial Sequence
  BAG57312 variant
augccccugcuccugcuucugccucuccugugggccgaccuuacccacagaccgaagauccugauucccggcacacucgagccugggcauagcaaaaaccugacgugcuccgugucuugggcuugugaacagggaacacccccuaucuucagcuggcuguccgccgcgcccaccucucucggcccucggaccacacacagcuccguccugauuaucaccccgcgcccccaagaucaugggacaaaucuuaccugccagguuaaguuugcuggagccggcgugacgaccgagagaacaauucagcugaacgugaccuacgucccucagaaucccacaaccgggaucuucccuggagacggcucuggcaaacaagaaacgcgggccggggugguucacggagcuaucggcggggccggagugacagcucuccuggcccuuugucugugccucaucuuuuucauugucaagacccaucgcagaaaagcggcccggacagcugugggccgcaacgauacccaccccaccacagggagcgccuccccgguuagcgacggagcuucuuggcacccugugugucccgccgauacguccagccagugcggcccucccucuugucccauucagcauuuucagaauuga

SEQ ID NO: 3093 - RNA, 1095 nt, Artificial Sequence
  AAK83654 variant
augccccugcuccugcuucugccucuccugugggccggcgcucuugccauggacccgaacuucuggcuccaggugcaagagagcgucaccguucaggaagggcugugcgugcuggugcccuguacauuuuuccacccuauccccuacuaugauaaaaauuccccuguccauggauacugguuuagagagggcgcgauuaucucucgggacagccccguggcuacgaacaagcuggaucaggaaguucaggaggaaacccaagggcgcuucagacuccugggagacccuucccggaauaacugcucucuuagcauuguggaugcccgcagacgggacaauggcuccuacuuuuuccgcauggagagagggucuacaaaguauagcuauaaauccccgcagcugagcguccacgugaccgaucucacacaucggcccaagauccugauuccuggaacccuugagcccggccacucuaaaaaccugacauguuccguuagcugggccugcgaacagggcaccccucccaucuuuucuuggcucuccgcugccccgacgagccuggggccucgcaccacacauucuuccgugcugaucauuacccccagaccucaggaccacggaacaaaucucaccugucaagucaaguucgcuggcgccggggugacgacagagcggaccauccagcugaacgugacauacgucccccagaaucccaccaccggaauuuuuccuggcgaugggagcggaaagcaggaaacacgcgcgggcguugugcacggcgccaucgggggagcuggcgugacggcccuucuggcucucugccugugucuuauuuucuuuaucgucaaaacccauagacggaaggccgcgcgcacagccguggggagaaacgacacccacccgacaaccggauccgcuucucccaaacaucaaaagaaaagcaagcugcacggcccuacggagacauccagcugcucuggggccgcucccaccguugagauggaugaggaacuccacuaugccucccugaauuuccauggaaugaacccuagcaaggacaccucuacagaauacagcgaggugcggacccaguga

SEQ ID NO: 3094 - RNA, 1095 nt, Artificial Sequence; identical to SEQ ID NO: 3093
  CAD36509 variant

SEQ ID NO: 3095 - RNA, 624 nt, Artificial Sequence
  AAA52295 variant
augcagagcggcacccacuggagagugcuggggcucugccugcuuuccgucggaguuuggggccaagacgggaacgaggaaaugggaggcaucacacagacgcccuacaaggugucuauuagcgggaccacagugauccugaccuguccucaguauccgggauccgagauucucuggcagcauaaugauaaaaacaucggcggcgacgaagaugacaagaauauugggucugaugaggaccaccugagccuuaaagaguucuccgaacuggagcaaucuggauacuaugucugcuacccccggggcagcaagccugaagaugccaacuuuuaucucuaccugcgcgcuagagugugugagaauugcauggaaauggacguuauguccguggccacaaucgucaucguggauauuuguaucaccgggggacugcuccugcuuguuuauuacuggagcaaaaaccggaaggcgaaggcuaaacccgugacacgcggcgccggggccggaggcagacagcggggccagaauaaggagcgcccucccccugucccgaaccccgacuacgagccuauuagaaaagggcagcgggaucuguauucuggacucaaucaacgcagaaucuga

SEQ ID NO: 3096 - RNA, 495 nt, Artificial Sequence
  AAH25703 variant
augaaguggaaagcccuguucaccgcugccauccuccaggcgcaacugcccauuacagaggcucagagcuuuggccuucuggacccuaagcucugcuaccugcuugaugggauccuguucauuuauggagugauccucacggcccuguuucugagagucaaauucucccggucugccgacgcuccggccuaccagcagggccaaaaccagcucuauaaugaacugaaccuugggcgcagagaggaauacgauguucuggacaagcggcgcggaagagaucccgagaugggcgggaaaccucagcggcgcaagaauccccaggaaggacucuauaacgagcugcaaaaggacaaaauggcugaggccuacagcgaaauuggcaugaagggcgagagacggcgcgggaaaggacacgauggccuuuaucaggggcuguccaccgcgacaaaggacaccuacgaugcccuccauaugcaggcucugccucccagauga

SEQ ID NO: 3097 - RNA, 2229 nt, Artificial Sequence
  CCDS7897.1 variant
auggacaaguucugguggcacgccgcuuggggccugugccucgugccccugagccuugcccagaucgaucugaacauuaccuguagauuugcgggggucuuccauguugagaaaaauggacgguacuccaucucucgcacagaagcugccgaccucugcaaggccuuuaacagcacgcugccuaccauggcucaaauggagaaagcccuuuccauuggcuucgaaacauguagauauggguuuaucgagggacacguggugauuccgcggauccaucccaauucuaucugcgcugccaacaauaccggcgucuacauucugacaagcaacaccucccaguaugauacauacuguuucaaugcgucugccccucccgaagaggacugcaccagcgugacggaucucccuaacgcuuuugacgggcccaucaccauuacaaucguuaaucgcgauggaaccagauaugugcagaagggcgaguaccggacaaacccugaagacauuuauccguccaaucccaccgaugacgaugucagcucuggcuccagcucugagcgcuccagcacgucugggggauacaucuucuacacauuuuccaccgugcacccuauucccgacgaagauagcccuuggaucacagacuccaccgacagaauccccgccaccacacugaugucuacgagcgcuaccgccacagagaccgcgacaaaacggcaggagaccugggauugguucuccuggcuguuucucccgagcgaaucuaagaaccaucugcacacgacaacccaaauggccggcaccuccagcaauacaauuucugcugggugggagccuaacgaagagaaugaagacgagcgcgauagacaccuuagcuucuccggaucuggcaucgacgaugacgaggauuuuauuagcuccaccaucagcacaacgccccgggccuucgaccauaccaagcagaaccaggauuggacacaguggaacccuucucacuccaaucccgaaguucugcuccaaaccacaacccgcaugacggacguggauagaaacgggaccacagcuuaugagggaaauuggaaccccgaagcccauccuccgcugauucaccacgagcaucacgaagaggaggaaacaccccauagcaccucuaccauccaggccacgccuuccagcacaaccgaggaaacagcuacccagaaagagcagugguucggcaaucgguggcacgaaggcuaccgccaaacccccaaggaggacucccauucuacaacggggaccgcggccgcuagcgcccacacaucccacccuaugcagggaagaaccacacccucuccggaggacagcuccuggaccgacuuuuucaacccuaucagccaucccaugggccgggggcaccaggccggaagacgcauggauauggauucuucccauagcauuacgcuucaaccuacagcuaaucccaacaccggccuggucgaagaccucgaucggaccgggccucugucuaugacaacccagcaguccaauagccagucuuuuagcacaucccacgagggacuggaagaggacaaagaucaccccacgaccagcacacucaccucuuccaacagaaaugacgugacaggcggccgccgggauccgaaccauagcgagggguccaccacgcugcuugaaggauauaccucucacuacccucauacaaaggagagcagaaccuucauccccgugacauccgccaaaaccggcucuuuuggggucacagcgguuaccgugggagacagcaauuccaacgugaaucgcucucugagcggcgaucaagacacguuccaccccuccgggggcagccauacaacccacggaucugaauccgauggccacagccaugggucucaggagggaggcgcuaacaccacauccgggccuauucggaccccgcagauccccgaauggcucauuauccuggccagccuucuggcccucgcucugauccuggccgucuguauugcugugaacucuagacgccggugcggacagaagaagaaacucguuaucaauuccggcaacggggccguggaggacagaaagccuagcggccugaauggagaggcguccaaaagccaagaaaugguccaccuugugaacaaggagucuagcgaaacgcccgaccaguuuaugacagccgaugagacccgcaaucugcagaacguugacaugaaaauuggcguguga

SEQ ID NO: 3098 - RNA, 2100 nt, Artificial Sequence
  XM_006718388.1 variant
auggacaaguucugguggcacgccgcuuggggccugugccucgugccccugagccuugcccagaucgaucugaacauuaccuguagauuugcgggggucuuccauguugagaaaaauggacgguacuccaucucucgcacagaagcugccgaccucugcaaggccuuuaacagcacgcugccuaccauggcucaaauggagaaagcccuuuccauuggcuucgaaacauguagauauggguuuaucgagggacacguggugauuccgcggauccaucccaauucuaucugcgcugccaacaauaccggcgucuacauucugacaagcaacaccucccaguaugauacauacuguuucaaugcgucugccccucccgaagaggacugcaccagcgugacggaucucccuaacgcuuuugacgggcccaucaccauuacaaucguuaaucgcgauggaaccagauaugugcagaagggcgaguaccggacaaacccugaagacauuuauccguccaaucccaccgaugacgaugucagcucuggcuccagcucugagcgcuccagcacgucugggggauacaucuucuacacauuuuccaccgugcacccuauucccgacgaagauagcccuuggaucacagacuccaccgacagaauccccgccaccacacugaugucuacgagcgcuaccgccacagagaccgcgacaaaacggcaggagaccugggauugguucuccuggcuguuucucccgagcgaaucuaagaaccaucugcacacgacaacccaaauggccggcaccuccagcaauacaauuucugcugggugggagccuaacgaagagaaugaagacgagcgcgauagacaccuuagcuucuccggaucuggcaucgacgaugacgaggauuuuauuagcuccaccaucagcacaacgccccgggccuucgaccauaccaagcagaaccaggauuggacacaguggaacccuucucacuccaaucccgaaguucugcuccaaaccacaacccgcaugacggacguggauagaaacgggaccacagcuuaugagggaaauuggaaccccgaagcccauccuccgcugauucaccacgagcaucacgaagaggaggaaacaccccauagcaccucuaccacggccuccgcucacacaagccauccuaugcagggccggaccacacccuccccugaggacucuagcuggaccgacuucuuuaaucccaucucccacccgaugggccgcgggcaccaggcgggaagacggauggauauggacucuagccauuccaucacccuucagccuacagccaaccccaauacgggccuggucgaagaucucgacagaaccgggccucugagcaugacaacccaacagucuaacucccagagcuucucuacaucccacgagggacuggaagaggauaaagaccaucccaccacgagcacacucaccucuagcaaucgcaacgaugugaccggcgggcggagagacccuaaucacuccgagggaagcacaacccugcuugaaggcuacacaucucacuauccccauacgaaggagucccgcaccuuuauuccggugacaagcgcuaaaaccggcuccuucggggucacagccguuaccgugggagauucuaacagcaaugugaaccggucccugucuggcgaccaagauacguuucacccuagcgggggaucccauaccacacacggcucugaaagcgacgggcauucccacggcagccaggagggaggcgccaauaccacaucugggcccaucagaacaccccagauuccugaguggcucaucauucuggcuucccuucuggcccucgcgcugauccuggcugucuguaucgccgugaacagccgccggagaugcggacagaagaaaaagcucguuauuaacucuggcaauggggccguggaagaucgcaagccguccggacugaacggcgaggcuagcaaaucucaagaaaugguccaccuugugaauaaggaguccagcgaaacccccgaccaguucaugaccgccgacgagacgcggaaccugcagaauguugauaugaaaaucgggguguga

SEQ ID NO: 3099 - RNA, 1377 nt, Artificial Sequence
  AAA35572 variant
augaacagaggcgugcccuuccggcaucugcuccugguccuucagcuggcccuccugccugcugccacccaagggaagaaaguugugcuuggaaagaaaggcgacacaguggagcugacgugcaccgcgagccagaagaaauccauccaguuucacuggaaaaauucuaaccagauuaagauccucgggaaucaaggcagcuuccugacaaaaggaccguccaagcugaacgaucgcgcugacucuagacggagccucugggaucaggggaauuuuccccugauuaucaaaaaccuuaagauugaagacuccgauaccuacaucugugaggucgaagaccagaaagaggaagugcagcugcucguuuucggacugacagccaauucugauacccaccuucugcaaggccagagccucacacugacccuggaguccccucccggcagcucuccuuccgugcagugccgcagccccagagggaagaacauccagggaggcaagacgcucucugucucccaacuggagcuucaggacagcgggaccuggacauguaccgugcugcagaaucaaaagaagguugaauuuaaaauugauaucgugguccucgccuuccagaaggcuucuuccauuguguauaaaaaggagggagaacagguggaguuuagcuucccucuggccuuuacagucgagaaacuuaccggcuccggggaacugugguggcaggcugagcgggccucuagcuccaagagcuggaucacguucgaccucaagaacaaagaaguuucugugaagcgcgugacacaagauccgaaacugcagaugggaaagaaacugccccuccaucugacccuuccucaggcgcugccccaguacgccggcuccggcaaucucacacuggcucuugaggccaagaccgggaagcugcaccaagaagucaaccucgugguuaugagagcuacccagcugcagaaaaaucugacaugcgagguguggggaccuacgagccccaagcucaugcugucucuuaaacuggagaacaaggaagccaaagucagcaagcgggagaaggcgguguggguucucaauccggaagccggcauguggcagugucugcuguccgacucugggcaagugcuucucgagagcaacauuaaaguccugccuaccugguccacacccgugcagccuauggcucugaucguccucggaggcguggccgggcugcuucuguuuauuggacucggcaucuucuuuugcguucgcuguagacaucggcgcagacaggcugaacggaugagccagaucaagcgccugcugucugagaaaaagaccugccaauguccccacagauuccagaaaacaugcucccccauuuga

SEQ ID NO: 3100 - RNA, 186 nt, Artificial Sequence
  CAA44323 variant
augaagagauuccuguuucuccugcuuaccaucagccugcucgugaugguccagauucaaacaggccuguccgggcagaacgacacgucucagaccagcucccccucugccagcuccaauaucucuggaggcauuuuccuuuucuuuguugcuaacgccaucauucaccuguuuugcuucagcuga

SEQ ID NO: 3101 - RNA, 186 nt, Artificial Sequence
  AAP35780 variant
augaagagauuccuguuucuccugcuuaccaucagccugcucgugaugguccagauucaaacaggccuguccgggcagaacgacacgucucagaccagcucccccucugccagcuccucuaugagcggaggcaucuuccuuuucuuuguugcuaaugccauuauccaccuguuuugcuucuccuga

SEQ ID NO: 3102 - RNA, 186 nt, Artificial Sequence; identical to SEQ ID NO: 3100
  ACS44650 variant

SEQ ID NO: 3103 - RNA, 954 nt, Artificial Sequence
  EAW93489 variant
augaccguggccagacccagcgucccugcugcccugccgcuccugggcgagcuuccccggcugcuccugcuuguucugcucugccugccugcgguguggggcgacuguggacugcccccugaugugcccaacgcucagccugcccucgaaggccgcacauccuucccggaggacacggucaucaccuacaagugcgaagagucuuuugugaaaauucccggggaaaaggauagcguuaucugucugaaaggaucccaauggucugacauugaggaguucugcaaucaaaagagcuguccuaaccccggcgaaaucagaaaugggcagauugaugugccuggaggcauccuuuuuggcgccacaaucuccuucucuugcaacaccggguauaaacuguuuggaagcacauccagcuucugucucauuucuggcuccagcguccaguggucugacccccugccggagugccgggaaaucuacuguccugcucccccucaaauugauaaugggaucauucagggagagcgcgaccacuauggcuacagacaguccgugaccuaugccugcaacaagggguuuacaaugaucggagagcauagcauuuacuguaccguuaauaacgaugaaggcgaguggucugggcccccucccgaaugccgggggaagucccuuacgagcaaagugccgcccaccguccagaagccuacaaccgugaaugugcccacaaccgaggucuccccuacgucucagaaaacaaccacaaagaccaccacacccaacgcucaggccacgcgcagcaccccgguuuccagaacaaccaaacacuuccaugaaacaaccccuaauaagggaagcggcacgacaucugggaccacccggcugcucuccggacacacaugcuuuacccugacaggccugcucgggacgcuggugaccaugggacuucugacauga

SEQ ID NO: 3104 - RNA, 882 nt, Artificial Sequence
  EAW93497 variant
augaucggcgagcacagcauuuacugcaccgugaacaaugacgaaggggagugguccggacccccuccggaauguagaggcaagucucugacaagcaaaguucccccuacgguccagaagcccaccacagugaacgugccuaccacagaggucucccccaccucucaaaagacaaccacgaagaccacaaccccuaaugcccaggggacagaaaccccgagcgugcuccagaaacauacgacagagaacguuuccgcuacccggacacccccuacaccccagaagccuaccaccgugaauguccccgccacgaucgugaccccgacaccucaaaagcccaccacaauuaacguuccugcgaccggagugucuagcacgccccagcgccacacaaucgucaauguguccgcuaccggcacccugcccacacuucagaaaccuaccagagccaacgauagcgccacaaagucuccggcugccgcucagacguccuucauuagcaaaacccugucuacaaagacccccuccgccgcgcaaaauccuaugaugacaaacgccagcgcuacccaggccacgcucaccgcucagaaauuuacaaccgccaagguggcguucacacagucucccuccgccgcucggaaaagcaccaauguccauuccccuguuacgaacgggcugaaaucuacacaacgcuuucccagcgcccacaucaccgcuacaagauccaccccggugagccggaccacaaagcauuuccacgagacgaccccuaauaaaggaucuggcacaaccuccggcacaacccgccuucugagcgggcacacgugcuuuacacucaccggacugcugggcacccucgugacaauggggcugcuuaccuga

SEQ ID NO: 3105 - RNA, 804 nt, Artificial Sequence
  EAW93493 variant
augaucggcgagcacagcauuuacugcaccgugaacaaugacgaaggggagugguccggacccccuccggaauguagaggcaagucucugacaagcaaaguucccccuacgguccagaagcccaccacagugaacgugccuaccacagaggucucccccaccucucagaaaacaaccacgaagaccacaaccccuaaugcccaagggacagaaaccccgagcgugcuccagaaacauacgacagagaacguuuccgcuacccggacacccccuacaccccagaagccuaccaccgugaauguccccgccacgaucgugaccccgacaccucaaaagcccaccacaauuaacguuccugcgaccggagugucuagcacgccccagcgccacacaaucgucaauguguccgcuaccggcacccugcccacacuucagaaaccuaccagagccaacgauagcgccacaaagucuccggcugccgcucagacguccuucauuagcaaaacccugucuacaaagacccccuccgccgcgcaaaauccuaugaugacaaacgccagcgcuacccaggccacgcucaccgcucagaaauuuacaaccgccaagguggcguucacacagucucccuccgccgcuccuacccggagcacgcccgucucccgcacaaccaagcauuuucacgagacaaccccgaauaaagggucuggaaccacaagcggcacgaccagacugcuuuccggccauacaugcuucacccugacagggcuccugggaacccugguuacgaugggccuccugacauga

SEQ ID NO: 3106 - RNA, 1146 nt, Artificial Sequence
  AAA52168 variant
augaccguggccagacccagcgucccugcugcccugccgcuccugggcgagcuuccccggcugcuccugcuuguucugcucugccugccugcgguguggggagacugugggcugcccccugaugugcccaacgcucagccugcccucgaaggccgcacauccuucccggaggacacggucaucaccuacaagugcgaagagucuuuugugaaaauucccggggaaaaggauagcguuaucugucugaaaggaucccaauggucugacauugaggaguucugcaauagaagcugugaagugccuacacggcuuaacuccgccucucugaagcagcccuauaucacccagaauuacuuuccugucggcacagugguugaguaugaaugccgccccggguacagacgggagccgagccucuccccuaaacugaccugucuucagaaccugaaguggagcacagcuguggaguucugcaagaaaaagucuugucccaauccuggagaaauucgcaacggccaaaucgauguccccggcgggauccucuuuggagccaccauuuccuucagcugcaauacgggcuauaaacuguuugggucuaccuccagcuucugucugaucucuggauccagcgugcagugguccgacccccucccugagugcagagaaauuuacugcccggcucccccucagaucgauaacggcauuauccagggggagcgggaccacuauggauaccgccaaucugugacauacgccuguaauaagggcuuuaccaugauuggcgaacauagcaucuauugcacagucaacaaugaugagggggagugguccggacccccucccgaauguagaggcaaaagccugaccucuaagguuccgccuacggugcagaagcccacaaccgugaacgucccuacaaccgaggugucccccaccagccagaaaacaacgaccaagacaaccacaccuaaugcgcaggccacccggucuacgcccguuagccgcacaaccaaacacuuccaugaaaccacaccgaacaagggguccggaaccacaucuggcacgaccagacuucugagcgggcacacaugcuuuacccucacaggacugcuuggcacccuggugacgaugggccuccugaccuga

SEQ ID NO: 3107 - RNA, 2577 nt, Artificial Sequence
  CCDS73385.1 variant
augcugcagaccaaggaccucaucuggacacuguucuuucuuggcacggccgugagccugcaagucgauauuguucccucccagggggagaucucugugggagaaagcaaauucuuucucugccagguggcuggcgacgccaaggauaaagacauuuccugguucucuccuaacggggagaagcugaccccgaaucagcaaagaaucagcgucguguggaacgaugacuccucuagcacacuuaccauuuacaaugcgaacaucgaugacgcuggaaucuauaaauguguugugacaggcgaagauggguccgagagcgaagccaccgucaaugugaagauuuuucagaagcugauguucaaaaacgcccccacaccucaggaguuucgggagggagaagacgcuguuaucgugugcgaugucgugucuucccugcccccuaccauuaucuggaagcacaaaggccgcgacgugauucucaagaaagaugucagauucaucguucugagcaauaacuaccuccagauucggggcaucaagaagacggacgaggggaccuaucgcugugaaggaagaauccuggcccggggcgagauuaauuuuaaagacauccaagugauugugaacgugcccccuacaauccaggcucgccagaauauugugaacgccaccgcgaaucuugggcagucuguuacacuggugugcgaugccgagggauucccggaacccaccauguccuggacgaaggacggcgagcaaaucgaacaggaggaagaugacgagaaauacaucuuuagcgaugacucuucccagcucacaauuaagaaagucgauaagaacgacgaggcugaauauaucuguauugccgagaauaaagcuggggaacaagaugccaccauccaucugaagguguucgcgaagccuaaaauuacauacguugagaaccagaccgccauggaacuugaggagcaggucacccugacaugcgaagcuagcggagaccccaucccuuccaucacguggagaaccucuacacggaacauuagcuccgaggaaaaggccagcuggacccgccccgagaaacaggaaacacucgauggccacauggucgugagaucucaugcucgggucuccagccugacccugaagucuauccaauauacggacgccggcgaguacauuuguacagccagcaauaccaucgggcaggacucccagucuauguaccucgaggugcaguaugcuccgaaacugcaaggaccuguugcgguguacaccugggaaggcaaccaggucaauauuacaugcgagguguuugccuaucccagcgcuaccaucuccugguuccgcgaugggcagcuucugccuagcucuaacuacuccaauauuaagaucuauaacacacccagcgccucuuaccucgaaguuacgcccgacuccgagaaugauuucggaaacuauaauuguaccgccgugaacagaaucggccaggagagccuggaauuuauucuuguccaagcugacacaccuuccucuccgagcaucgaucagguggagcccuacuccucuaccgcccaggugcaguucgacgaaccugaggcgacagggggaguucccauucugaaguacaaagcugaauggcgggccgucggcgaggagguguggcacagcaagugguaugaugccaaagaggcuuccauggagggcaucgugaccauugucgggcucaagccugaaacgaccuacgccgugcgccuggcugcccugaauggaaaaggccucggggagaucagcgcggccucugaauuuaagacacaacccguucagggagagccguccgcuccuaagcuggagggccagaugggggaagacggcaacagcaucaaagugaaucuuauuaagcaagaugacggaggcucucccaucagacauuaucugguccgguacagagcccucuccagcgaguggaaaccugaaauucgccugcccucugggagcgaucacgugaugcuuaagucccuggacuggaacgcugaguaugaaguuuacguggucgccgagaaucagcagggaaaaagcaaggcggcccacuucguguuucggaccucugcucagccuacagccauccccgcuaacggcuccccgaccagcgggcucuccacgggagccauuguuggcauccugaucgugauuuucguccugcuccuggugguggucgauaucacaugcuauuuucuuaacaagugugggcuguucaugugcauugccguuaaucucugcggcaaagcuggaccuggcgcgaaggggaaagacauggaggaaggaaaggccgcuuuuucuaaagacgagagcaaggaacccaucguggaggugagaaccgaggaagaacgcacacccaaccaugauggcgggaaacacaccgaaccuaaugagaccacaccgcugacggaacccgagaagggaccugucgaggccaagcccgaaugucaagagaccgaaacaaaaccugcccccgcugaggugaagaccguuccuaacgacgccacacagaccaaagaaaaugaguccaaggcguga

SEQ ID NO: 3108 - RNA, 867 nt, Artificial Sequence
  ABK41933 variant
augggccacaccagacggcaggggacaagccccuccaagugcccuuaccugaacuucuuucaacuccuggugcuugccggacugucucauuucuguagcggcgucauccacguuacgaaagaggugaaggaaguggcuacccucuccugcgggcauaaugucucuguggaggaacuggcccagacacgcauuuauuggcagaaagagaagaaaaugguucuuaccaugaugagcggagacaugaacaucuggccggaauacaagaauagaacaauuuuugauaucaccaacaaucuguccauugugauccucgcgcugcggcccucugacgagggcacauaugagugugucgugcugaaguacgaaaaagaugcuuucaagcgcgagcaccucgccgaaguuacccugagcgugaaagccgacuuuccuacgcccuccaucagcgauuucgagauuccuaccucuaacaucagacggauuaucugcuccacaagcgggggauuucccgagccucaucuuucuuggcuggaaaauggcgaggaacucaacgcuauuaauaccacagucucccaggacccggagaccgaacuguaugccgugagcucuaaacuugauuucaacaugacgacaaaucacuccuuuaugugucugaucaaguacggccaccuccgcgugaaccaaaccuucaauuggaacacaaccaagcaggagcauuuucccgacaaucugcugccuagcugggcuauuacccucaucuccgucaacgggaucuucguuauuugcugucugacauauugcuuugcccccagaugucgggagcgcagacggaacgaacgccuuagacgggagucugugcgcccuguguga

SEQ ID NO: 3109 - RNA, 867 nt, Artificial Sequence; identical to SEQ ID NO: 3108
  AAA36045 variant

SEQ ID NO: 3110 - RNA, 990 nt, Artificial Sequence
  CCDS3009.1 variant
auggacccccagugcaccaugggccugagcaacauccucuucgugauggccuuucugcuuuccggggcugccccucugaagauucaagcguacuucaaugagacagcugaucucccgugucaguuugccaacucucagaaucagagccuguccgaacuugucguuuucuggcaagaccaggagaaccuggugcucaaugaaguguaucugggaaaagagaaguuugauucuguccacagcaaauacaugggcagaacguccuucgacucugauagcuggacccugcggcuccauaaccugcagaucaaggacaaagggcuuuaucagugcauuauccaccauaagaagcccacaggaaugauucgcauccaccaaaugaacuccgaacugagcgugcucgccaauuuuucucagccugagaucguucccauuuccaauaucaccgagaacguguacauuaaucugacauguagcucuauccauggcuauccugaacccaaaaagauguccguccuucugagaaccaaaaacagcacaauugaguacgauggggugaugcagaagucucaggacaauguuaccgaacucuaugauguguccaucagccuguccgucucuuucccugacgugacgagcaacaugaccaucuuuugcauucuggagacagauaaaacccggcuccuguccagcccguucucuaucgagcuugaagacccccaaccucccccugaucacauucccuggaucacagcugugcugccgaccgucauuaucuguguuaugguguuuugccucauucuguggaaguggaagaaaaagaaacgcccuagaaauuccuacaaguguggaacgaacacaauggagcgggaagagagcgaacagaccaaaaagcgcgagaaaauccacauccccgagagaucugacgaagcccagcggguguucaagagcuccaagacaucuagcugcgacaaauccgauaccuguuuuuga

SEQ ID NO: 3111 - RNA, 708 nt, Artificial Sequence
  AAA59674 variant
auggcccugcccgugaccgcucuccugcuuccucuggcccuccugcuucacgcggcuagaccgagccaguuccgggucucuccccuggaccgcacauggaaccucggcgagacgguugaacugaagugccaagugcugcucuccaauccuaccagcggguguuccuggcuguuucagcccagaggagccgccgcuucuccuacauuccuucuguaccucagccagaacaaacccaaggccgcugagggccuggauacccagcgguuuuccgggaaacgccuuggagacacauucgugcugacccucucugauuuuagacgggaaaaugagggcuauuacuucugcagcgcccuguccaacagcaucauguauuuuucucauuucgucccuguguuucugccggcgaagcccacaaccacgccugcgccccgcccucccaccccggcuccuacaauugccucccaaccccucagccugagaccugaagccugucggcccgccgccgggggagccguucacacccgcggccuugacuucgcuugcgauaucuacauuugggcuccccuggcuggcacauguggggugcuccugcuuucucuggucaucacccucuauugcaaucauagaaaccggcgcagaguguguaaaugcccucggccgguugugaaguccggagacaagcccagccugucugcccgcuacgucuga

SEQ ID NO: 3112 - RNA, 2472 nt, Artificial Sequence
  EAW57688 variant
augaccgugcugcaggagcccguccaagccgcuaucuggcaggcccucaaccacuacgcguauagagacgcuguuuuccuggccgaacggcuuuacgccgaggugcauagcgaagaggcucuguuucuccuggccacaugcuauuaccgcuccggcaaggcuuauaaagccuacagacuucugaaggggcacucuuguacgaccccucagugcaaauaucuccuggcgaaguguugcguggaucugagcaaacucgccgaaggagagcagauucuguccggcggggucuucaauaagcaaaagucucaugacgauaucgugacagaguuuggagacagcgcuuguuucacccuuucccugcucggccacguuuacugcaaaacagaucggcuggccaaggggucugaauguuaccagaaaagccuuucccugaacccguuucucuggagccccuucgagucucugugcgaaauuggagagaagccugaccccgaucagaccuuuaaauucacaucccugcagaauuuuagcaacugucucccuaauucuugcaccacgcaagugcccaaccauucccugagccaccgccagccugagaccguccuuacagaaaccccgcaggacacaaucgagcugaauagacucaaccuggaaucuuccaauagcaaguauucccuuaacaccgauucuagcguguccuacauugacagcgcuguuaucucucccgauacggugccucugggcacaggcaccuccauccucagcaagcagguccaaaauaaacccaagacagggcggucucugcugggaggcccugccgcgcucagcccccugaccccguccuucgggauucuuccucuggagacccccucuccuggagacggcagcuaucuccagaacuacacaaauacgccucccgugaucgaugugcccuccaccggggccccgagcaaaaagucugucgcucgcauuggacagacaggcaccaaauccguuuuuagccaaucuggcaacuccagagaagugacacccauccuggcccagacccagagcuccgggccucagacgucuacaacaccccaagugcuuagcccuaccauuaccucucccccgaaugcucugccucggcgcuccagcagacucuucaccuccgacagcucuacaacgaaggagaacuccaaaaagcugaagaugaaauuucccccuaagauccccaaccggaaaaccaagagcaaaacaaauaagggaggcauuacccagccuaacaucaaugacucucuggagaucacaaagcucgauuccagcauuaucucugaagggaaaauuagcaccaucacgccccagauucaggccuucaaccugcaaaaggccgcugcgggacuuaugucccugcuccgcgagaugggcaaaggguaucuggcccuguguagcuacaauugcaaggaagcuaucaacauccuuucucaccucccgucccaucacuauaauaccggauggguccugugccagauuggcagagccuacuucgagcugagcgaauacaugcaggccgagcggaucuuuuccgaggugcgcagaauugaaaacuaucggguugagggcauggaaaucuacucuacaacccucuggcaucugcagaaagacguggcucuuagcguccuguccaaggaucucacagacauggauaaaaauucuccugaggccuggugugcggcugggaacugcuucagccugcaaagagaacacgacauugccaucaaguuuuuccagcgcgccauccagguggaucccaauuaugcuuacgccuauacccugcuuggacacgaguuuguucucacggaggaacuggacaaggcucuggccuguuuccggaacgcgauuagagugaauccccgccauuacaacgccugguauggccucgggaugaucuacuacaaacaggagaaguuuucccuggcugaaaugcacuuccaaaaagcccuugauauuaauccucagucuagcguccugcucugccauaucggagugguccagcacgcucugaagaaguccgagaaagcccuggacacacuuaacaaggcgauugugaucgauccgaaaaacccccucuguaaguuucaucgggccagcguucuguucgcuaaugagaaauauaagucugcccugcaagaacucgaggaacugaaacagauugugccuaaggagucccuugucuacuuucugaucggcaagguguauaaaaagcucgggcagacccaccuggcucugaugaacuucagcugggccauggaccuugaccccaaaggcgccaauaaccagaucaaggaagcuauugauaaaagauaccucccugacgaugaggagcccaucacacaagaggaacagauuaugggaaccgacgaaucucaggaguccagcaugaccgaugcggacgauacacagcugcacgccgcugaaucugacgaguuuuga

SEQ ID NO: 3113 - RNA, 2475 nt, Artificial Sequence
  AAB34378 variant
augaccgugcugcaggagcccguccaagccgcuaucuggcaggcccucaaccacuacgcguauagagacgcuguuuuccuggccgaacggcuuuacgccgaggugcauagcgaagaggcucuguuucuccuggccacaugcuauuaccgcuccggcaaggcuuauaaagccuacagacuucugaaggggcacucuuguacgaccccucagugcaaauaucuccuggcgaaguguugcguggaucugagcaaacucgccgaaggagagcagauucuguccggcggggucuucaauaagcaaaagucucaugacgauaucgugacagaguuuggagacagcgcuuguuucacccuuucccugcucggccacguuuacugcaaaacagaucggcuggccaaggggucugaauguuaccagaaaagccuuucccugaacccguuucucuggagccccuucgagucucugugcgaaauuggagagaagccugaccccgaucagaccuuuaaauucacaucccugcagaauuuuagcaacugucucccuaauucuugcaccacgcaagugcccaaccauucccugagccaccgccagccugagaccguccuuacagaaaccccgcaggacacaaucgagcugaauagacucaaccuggaaucuuccaauagcaaguauucccuuaacaccgauucuagcguguccuacauugacagcgcuguuaucucucccgauacggugccucugggcacaggcaccuccauccucagcaagcagguccaaaauaaacccaagacagggcggucucugcugggaggcccugccgcgcucagcccccugaccccguccuucgggauucuuccucuggagacccccucuccuggagacggcagcuaucuccagaacuacacaaauacgccucccgugaucgaugugcccuccaccggggccccgagcaaaaagucugucgcucgcauuggacagacaggcaccaaauccguuuuuagccaaucuggcaacuccagagaagugacacccauccuggcccagacccagagcuccgggccucagacgucuacaacaccccaagugcuuagcccuaccauuaccucucccccgaaugcucugccucggcgcuccagcagacucuucaccuccgacagcucuacaacgaaggagaacuccaaaaagcugaagaugaaauuucccccuaagauccccaaccggaaaaccaagagcaaaacaaauaagggaggcauuacccagccuaacaucaaugacucucuggagaucacaaagcucgauuccagcauuaucucugaagggaaaauuagcaccaucacgccccagauucaggccuucaaccugcaaaaggccgcugcggagggacuuaugucccugcuccgcgaaaugggcaaaggguaucuggcccuguguagcuacaauugcaaggaggcuaucaacauccuuucucaccucccgucccaucacuauaauaccggauggguccugugccagauuggcagagccuacuucgaacugagcgaguacaugcaggccgagcggaucuuuuccgaagugcgcagaauugagaacuaucggguugaaggcauggagaucuacucuacaacccucuggcaucugcagaaagacguggcucuuagcguccuguccaaggaucucacagacauggauaaaaauucuccugaagccuggugugcggcugggaacugcuucagccugcaaagagagcacgacauugccaucaaguuuuuccagcgcgccauccagguggaucccaauuaugcuuacgccuauacccugcuuggacacgaguuuguucucacggaagaacuggacaaggcucuggccuguuuccggaacgcgauuagagugaauccccgccauuacaacgccugguauggccucgggaugaucuacuacaaacaggaaaaguuuucccuggcugagaugcacuuccaaaaagcccuugauauuaauccucagucuagcguccugcucugccauaucggagugguccagcacgcucugaagaaguccgagaaagcccuggacacacuuaacaaggcgauugugaucgauccgaaaaacccccucuguaaguuucaucgggccagcguucuguucgcuaaugaaaaauauaagucugcccugcaagagcucgaggagcugaaacagauugugccuaaggaaucccuugucuacuuucugaucggcaagguguauaaaaagcucgggcagacccaccuggcucugaugaacuucagcugggccauggaccuugaccccaaaggcgccaauaaccagaucaaggaggcuauugauaaaagauaccucccugacgaugaggaacccaucacacaagaggaacagauuaugggaaccgacgagucucaggaauccagcaugaccgaugcggacgauacacagcugcacgccgcugagucugacgaguuuuga

SEQ ID NO: 3114 - RNA, 1788 nt, Artificial Sequence
  AAA51947 variant
augagagugcugcucgccgcucugggccuucuguuccucggggcccugcgggcguuuccccaggaccgcccuuucgaggauaccugccacggaaacccgagccauuacuaugacaaggcugucagacgguguugcuaccgcugucccaugggccuuuuuccuacacaacagugcccccagagaccuacggauugucggaaacagugcgaacccgacuauuaccuggaugaggccgaccgcuguaccgccugcguuacauguuccagagaugaccucguggaaaagaccccuugcgcuuggaacucuagccgggugugugagugccgcccggggauguucugcuccacaucugccgucaauagcugugcuagaugcuuuuuccacuccgugugucccgccggaaugaucguuaaauuuccuggcaccgcgcaaaagaauacagugugcgaacccgccucuccuggggucagccccgcuugugccuccccggagaacugcaaagagccuagcucuggaaccauuccccaggcuaagccuacgcccgugucccccgccaccagcucugcguccacaaugccuguucggggcggcacccgccuggcccaggaagcugccagcaagcugacaagagcuccggauucucccuccagcguggggcggccuuccucugaccccggacucagcccuacccagcccuguccggagggcuccggggauugccgcaaacaaugugaaccugacuauuaccuggaugaggccggaagaugcacggccugugucagcugcucucgggacgaccuuguggagaagacacccugcgcuuggaacuccagcagaaccugugaaugccgcccuggcaugaucugugcgacaucugccaccaauagcugcgcucggugugugcccuauccuauuugcgccgccgagaccgucacaaaaccccaggauauggcugaaaaggacacgaccuucgaggccccgccucuggggacacagcccgauuguaaucccaccccugaaaacggagaggcgccggcuuccacaucucccacccagagccuccugguugacucccaagccagcaaaacgcuuccuauccccacaucugccccuguggcucuguccagcaccggcaagcccgugcucgaugccggcccuguccuguuuugggugauucugguucucguggucgugguugggucuuccgcuuuccugcuuugccauagacgcgccugucggaagagaauccgccagaaacugcaccucugcuaccccgugcagaccagccaaccgaagcuggagcuugucgacucccggccuagacgcucuagcacacagcugcgguccggagcgucugugaccgaacccgucgccgaggaaagaggccucaugagccagccucugauggagacaugucauuccgugggggcugccuaccuggaaagccucccccugcaggaugcuucuccggccggaggcccuuccagcccccgcgaccuuccugagccccggguuucuacggagcacaccaauaacaaaaucgaaaagauuuauaucaugaaagcggauacagugauugucgggaccgugaaggccgagcugcccgaaggaagaggccucgcuggcccugccgagccggaacuggaggaggaacuugaggcugaccacacaccccauuacccugaacaagagaccgagcccccucugggguccugcagcgauguuaugcucucuguggaagaggaaggaaaagaggacccccugccuacggccgccagcggcaaguga

SEQ ID NO: 3115 - RNA, 912 nt, Artificial Sequence
  EAW97060 variant
auggccaccagcagauacgagcccguggcugaaaucggcgucggggccuauggaacaguuuacaaggcgcgggacccucacuccggccauuucguggcucugaaaucugugcgcgucccgaacgggggaggcgggggaggcggccuccccauuagcacggugagagagguugcccugcuucggcgccuggaagccuuugagcacccuaauguggucagacucauggaugugugcgcuaccucccggacagaccgcgaaaucaagguuacccugguguucgagcaugucgaucaggaccuuagaacauaucuggauaaagcucccccucccgggcucccugccgagaccauuaaggaccugaugcggcaauuucugcgcggacucgauuuccugcacgccaacuguaucgugcauagagaccuuaaaccggaaaauauucuggugacaucuggcgggaccgucaagcucgcggauuuuggacuggcccggaucuacagcuaucagauggcucuuacgcccguuguggugacccugugguaccgcgccccugagguccuccugcaguccacauaugcuacccccguggacauguggucuguuggcugcaucuucgccgaaauguuuagacggaagccucuguucugugggaacagcgaggcggaucagcucggaaaaauuuuugaccugaucggccuucccccggaggaugacuggccucgcgacgugucccugcccagaggcgccuucccuccccgggggcccagaccuguccaaagcgugguuccggaaauggaggaaucuggagcucagcuccugcuugagaugcugacauuuaauccccacaagcgcauuuccgccuuccgggcucuccagcacagcuaccugcauaaagaugaaggcaacccugaguga

SEQ ID NO: 3116 - RNA, 912 nt, Artificial Sequence; identical to SEQ ID NO: 3115
  AAA35673 variant

SEQ ID NO: 3117 - RNA, 690 nt, Artificial Sequence
  AAB50213 variant
auggacgugugcgccaccagcagaacagaucgggagaucaaggucacgcugguuuucgaacacguggaccaggaucuccgcaccuaccuggacaaagcucccccuccgggccuucccgccgagacaauuaaggaucugaugagacaauuucuccgggggcuggacuuccuucaugcgaacuguaucgugcaccgcgaucugaaaccugaaaauauucucgucaccuccggaggcacagugaagcuggcugacuuugggcuggccagaaucuauucuuaccagauggcccucacccccguuguggucacacugugguaucgggcuccugaggugcuucugcagagcaccuacgccacgcccguugauaugugguccgugggaugcauuuucgcugaaauguuucgcagaaaaccucucuucuguggcaacucugaggccgaccagcuggggaagaucuuugaucuuaucggacugccgcccgaggacgauuggccucgggacgucagccucccccgcggcgcguucccucccagaggcccgcggccugugcaauccgugguccccgaaauggaggaaucuggggcccagcugcugcucgagaugcugaccuuuaauccucauaagcgcauuagcgcuuucagagcccuucagcacuccuaucugcauaaagacgagggaaaccccgaauga

SEQ ID NO: 3118 - RNA, 336 nt, Artificial Sequence
  AAH15669 variant
auggccaccagcagauacgagcccguggcugaaaucggcgucggggccuauggaacaguuuacaaggcgcgggacccucacuccggccauuucguggcucugaaaucugugcgcgucccgaacgggggaggcgggggaggcggccuccccauuagcacggugagagagguugcccugcuucggcgccuggaagccuuugagcacccuaauguggucagacucauggaugugugcgcuaccucccggacagaccgcgaaaucaagagauguuucguugagucucugagcuccguggagacccuuaaacccacaucuugggccaagagccugaccuga

SEQ ID NO: 3119 - RNA, 429 nt, Artificial Sequence
  ACY78326 variant
auggagcccgccgcuggcagcuccauggaaccuucugccgacuggcuggcgaccgcugccgccagagggcggguggaggaaguccgcgcucuccuggaggccggagcccuuccgaacgcucccaauagcuacggcagacggccuauccagguuaugaugaugggguccgcgcgcguggccgaacugcuccugcuucacggagcugagcccaacugcgccgauccugcuacacugacgagacccgugcaugacgccgcgcgggagggcuuccucgauacccuggucgugcugcaccgcgccggggcuccuugugccaugccgggagcuguuugccccuggacauggcucagaucuugggccauugccaugagccauggcaccugugcucggcugcgcggcgcgccugaagccgugacaaugcccgcuuga

SEQ ID NO: 3120 - RNA, 351 nt, Artificial Sequence
  EAW58598 variant
auggagcccgccgcuggcagcuccauggaaccuucugccgacuggcuggcgaccgcugccgccagagggcggguggaggaaguccgcgcucuccuggaggccggagcccuuccgaacgcucccaauagcuacggcagacggccuauccagguugggcgcggauccgcggccggcgcuggggauggaggcagacuguggcggacaaaguucgccggcgaacucgagucugggagcgcuuccauucugcgcaaaaagggaagacuucccggcgaguuuucugaaggggugugcaaccaccggccucccccuggagacgcccugggcgcgugggaggccaaagaagaggaguga

SEQ ID NO: 3121 - RNA, 471 nt, Artificial Sequence
  AFN61598 variant
auggagcccgccgcuggcagcuccauggaaccuucugccgacuggcuggcgaccgcugccgccagagggcggguggaggaaguccgcgcucuccuggaggccggagcccuuccgaacgcucccaauagcuacggcagacggccuauccagguuaugaugaugggguccgcgcgcguggccgaacugcuccugcuucacggagcugagcccaacugcgccgauccugcuacacugacgagacccgugcaugacgccgcgcgggagggcuuccucgauacccuggucgugcugcaccgcgccggggcuagacucgacguucgggaugccuggggacgccugccuguggaccuugcugaggaacugggccauagagaugucgcccgguaucuccgcgccgcugcgggcgggacaagaggaucuaaucacgcccggauugacgcugccgaaggcccgagcgauauccccgacuga

SEQ ID NO: 3122 - RNA, 327 nt, Artificial Sequence
  CCQ43815 variant
auggaggugaugaugaugggcagcgccagagucgcugaacugcuccugcuucacggggccgagcccaacugcgcggacccugcuacccugacacggccgguucaugaugccgcccgcgaaggauuccucgacacgcugguggugcuucacagagcuggcgcccggcuggauguccgcgacgcuugggggagacuccccguggaucuggccgaggaacugggacaucgggacguugcgcgcuaccucagagccgcugccggcgggacccggggauccaaucacgcucgcaucgaugccgcggagggcccuucugacauucccgauuga

SEQ ID NO: 3123 - RNA, 399 nt, Artificial Sequence
  AAA82236 variant
auggugagacgguuccuggucacccuccgcaucagacgggccugcgggcccccucgcguuagaguguuugugguccacauuccgcggcugacaggcgagugggcugcccccggagcgccugcugccguggcccuuguucugaugcuccugcgcagccagagacuuggccaacagccccugccucggcgccccgggcaugacgauggacagagaccuuccggcggggcugccgcugccccgcggcgcggagcgcagcucagacggccccgccacucucauccuacgagagcccggagaugucccggcggccugccugggcacgcuggaggcgccgcucccgggcgcggagccgcgggccgggccagaugccuggggccgagcgcucgcggaccuggcuga

SEQ ID NO: 3124 - RNA, 2109 nt, Artificial Sequence
  CCDS12584.1 variant
auggagagccccuccgccccuccgcacagauggugcauccccuggcagcggcugcuccugaccgcuucucuucugacauucuggaacccucccacgaccgccaagcucacaauugaaagcaccccuuuuaauguggcggagggcaaagaaguccugcuucugguucauaaccucccccaacaccuguucggguacuccugguauaagggagagcgcguggacggcaauagacagaucauuggguacgugaucggaacacagcaggcuaccccuggcccggccuauucugggcgggaaauuaucuaccccaacgccagccugcucauccaaaauauuauccagaacgauacaggauuuuauacccugcaugucauuaaauccgaccuugugaaugaggaggcuacgggccaguuccgcguuuacccugaacugcccaagccuucuaucagcuccaacaauagcaaacccguggaggauaaggacgccgucgcuuuuaccugugaaccggagacacaggaugccaccuaucucuggugggugaacaaucaaucucugccuguuucccccagacuucagcugagcaacggcaaucggacacucacccuguucaacgugacgcgcaaugacacagcgucuuacaagugcgagacccagaacccugucuccgccagacggagcgauucugugauucugaacgugcucuacgggcccgacgcucccacaaucuccccucugaauaccagcuaucgcuccggagaaaaccuuaaucugucuugucacgccgcuagcaacccgcccgcccaguacuccugguuugucaauggcaccuuccaacagagcacacaggagcucuuuauuccuaacaucacgguuaauaacucuggguccuauaccugccaagcgcauaauagcgauacaggacugaacagaaccacagugaccacgaucacaguguacgccgaacccccuaaacccuucauuaccucuaauaacagcaauccggucgaggacgaagaugcuguggcccuuaccugugagccugagauccagaacacaaccuaucugugguggguuaauaaccagucccuccccgugucuccucggcugcagcugagcaacgacaaucgcacacucacgcugcuuuccgucaccagaaacgaugugggccccuacgaaugcgggauucaaaaugagcugagcguugaccacucugacccugugauccucaacguccuguauggacccgaugacccgacaauuuccccuagcuacaccuacuaucggcccggcgugaaucuuucucuguccugucacgcugccagcaaucccccugcccaguacuccuggcucaucgauggcaauauccagcagcauacacaagaacuguuuauuucuaacaucaccgagaagaauagcgggcuguauacgugccaggcuaacaauuccgcgucuggacacagccgcaccacagucaaaaccauuacaguguccgccgaacucccgaagcccagcaucucuuccaacaauagcaaaccuguugaggacaaggaugcuguggccuucaccugugagcccgaagcccagaacacgacauaccuguggugggucaauggccagucucuuccugugucccccagacugcaacucagcaacgggaaccggacccugacacuguuuaauguuaccagaaacgacgcucgcgccuaugugugcggcauucagaacucugucagcgcgaaccgguccgauccugugacccuugacgugcucuacggacccgauacaccgaucaucagcccucccgacucuuccuaucugagcggggcuaaucugaaccucuccugucauucugccagcaauccuucuccccaguacuccuggagaauuaacggaaucccgcagcaacacacgcagguucuguucauugccaagaucaccccuaauaacaauggcacauacgcuugcuucgucagcaaccuugccaccggccgcaauaacuccauugugaaaucuaucacagugagcgcuuccgggaccagccccggacugucugccggcgcgacggucgggauuaugaucggagugcucguuggcguggcccugaucuga

SEQ ID NO: 3125 - RNA, 1035 nt, Artificial Sequence
  AAA51739 variant
auggggcccccuagcgccccgcccugcagacugcacgugccuuggaaggagguccuccugaccgcuucccuucugacauucuggaaucccccuacgaccgccaaacucacaaucgaaucuacccccuuuaacguugcggagggcaaggaagugcugcuucuggcucauaaccucccucagaaucggauuggauacagcugguauaaaggcgagcgcguggacgggaacucccugaucgucggauacgugauuggcacacaacaggccaccccggggcccgccuauucuggaagagaaacaaucuacccuaaugcuagccugcucauucagaacguuacccagaaugauacgggcuucuauacccugcaagugaucaaguccgaccuugucaacgaggaggccacaggccaguuucacguguaccccgaacugccuaaacccucuaucagcuccaauaacagcaauccgguugaggauaaggacgcuguggccuucaccugugaaccugagguccagaacacaaccuaucucuggugggugaaugggcagucucugcccguguccccucggcuucaacugagcaacggaaauaugacgcucacacugcugucugucaagcgcaacgaugcgggcuccuacgagugcgaaauucagaaccccgccagcgcuaauagaucugaccccguuacccucaacgugcuguacgggccugauggaccgacaaucucccccagcaaagccaauuaucggccuggcgagaaccuuaaucuguccugucaugcugccucuaaucccccugcgcaguacagcugguuuauuaacgggaccuuccagcaauccacccaggaacucuuuauccccaacauuacagugaauaacagcggaucuuauaugugccaggcccacaauuccgcuacgggccugaaccgcaccacagucaccaugaucacagugagcggcucugccccgguucuuagcgcuguggccaccgucgggauuacgaucggagugcuggccagaguugcucucaucuga

SEQ ID NO: 3126 - RNA, 1173 nt, Artificial Sequence
  AAB04533 variant
augggcgccaccacaauggaccaaaagagccugugggcugggguggucguucuccugcuucugcagggaggcuccgccuacaaacucgugugcuauuucacgaacuggucucaggauagacaggagcccgggaaguuuaccccugaaaauaucgacccguuccuguguagccaccuuauuuacuccuuugcgucuaucgagaacaauaaagugauuaucaaggauaaaagcgaagucaugcuguaucagacaauuaacucccucaagaccaagaaucccaaacugaagauccugcucucuaucggaggcuaccuguucgggagcaaaggauuucauccuaugguggacuccagcacaucucggcuugaguucauuaacuccaucauucuguuucuccgcaaucacaacuucgauggccuggacguuagcuggaucuaucccgaucaaaaggaaaauacccauuuuacagugcuuauucacgagcuggcugaggccuuccagaaagacuuuaccaagucuacgaaggaaagacuccugcugaccgccggcgucuccgcugggcggcagaugaucgauaacagcuaccagguggagaaacucgccaaggaccuggauuucauuaaucuucugucuuuugacuuccauggauccugggaaaaaccucucaucacaggccacaacagcccccuguccaagggguggcaagaucgcggaccuucuagcuauuacaauguugaguacgcugugggcuauuggauccacaaagggaugccguccgagaaggucgugaugggcauucccaccuacggacauagcuucacacuugccucugcggaaaccacggugggcgccccugcuuccgggcccggagccgcuggcccuaucacagagagcucuggguuucuggccuauuacgaaauuugccaguuccucaaaggagcgaagaucaccagacugcaggaccagcaaguccccuaugccguuaagggcaaccagugggugggguacgacgaugugaaaagcauggagacaaagguccaguuucugaaaaaucucaaccugggaggcgcuaugauuugguccaucgacauggaugacuucaccggcaagucuuguaaccaagggccguauccucuugugcaggccguuaaacggagccugggaucccucuga

SEQ ID NO: 3127 - RNA, 2832 nt, Artificial Sequence
  AAD40367 variant
augacccagagaagcaucgccggccccauuugcaaccugaaguucgugacacuccuggucgcucuuuccucugagcugccuuuucucggggccggaguucaacugcaggacaauggcuacaacgggcuucugaucgcgauuaauccccaggugcccgaaaaccagaaucucaucagcaacauuaaagagaugaucacggaagcuagcuucuaucuguuuaaugccaccaagcggcgcguguucuuuagaaacaucaaaauucugaucccugccacauggaaggcuaauaacaauucuaaaauuaagcaagagagcuacgaaaaggccaacgucaucgugaccgauugguauggagcucacggcgacgaucccuacacacuccaguaucggggguguggaaaagagggcaaguacauucauuucaccccuaauuuucugcuuaacgacaaucugacagccggcuaugggucccgcggaagaguuuucgugcacgagugggcgcaucuccgguggggcgucuuugaugaauacaacaacgacaaacccuucuacaucaaugggcagaaccagauuaaggugacccgcugcucuagcgauaucacgggaaucuuuguuugugagaaaggcccuugcccgcaagaaaauuguauuaucuccaagcuguucaaggaggggugcaccuuuauuuauaacagcacacagaaugccaccgcuucuaucauguucaugcagucccuuagcucuguggucgaguucuguaacgccuccacacacaaucaggaagcucccaaccugcaaaaucagaugugcagccucagaucugccugggacgugauuaccgauuccgcggacuuucaucacagcuucccuaugaacggaacggagcugcccccucccccgacauuuucccuggugcaggccggcgauaaagucguuugucucgugcuggacgugucuagcaagauggcugaagccgaucggcuucugcaacuccagcaggcugccgaguucuaccugaugcagaucgucgaaauccacaccuuugugggcauugccuccuucgacagcaaaggggagauccgcgcucaacuucaucagauuaauucuaacgacgauagaaagcugcucguuuccuaucugccuacaaccgugagcgcgaaaaccgacaucucuauuugcagcggacugaagaaaggcuuugaggucguggaaaagcucaaugggaaggccuacggauccguuaugauccuggugacaucuggcgaugacaaacuucuggggaacugucuccccacgguccugagcuccggaagcaccauccacucuauugcucuuggcuccagcgccgccccuaaucuggaggaacucucucggcugacaggcgggcugaaguucuuugugcccgauaucuccaacagcaacuccaugauugacgcuuucucucgcaucagcuccggaaccggcgauauuuuucagcagcauauccaacucgagucuacaggggaaaaugucaaaccccaccaccagcugaagaacaccgugacgguugacaauacagugggaaacgauaccauguuccuugucaccuggcaggccagcggcccuccggagauuauccuguuugaccccgaugggagaaaauauuacacaaauaacuucaucaccaaucucacauuccggacggcgucccuguggauuccuggcaccgcuaagcccggacauuggacauauacccugaacaauacacaccauagccuucaggcccucaaggugaccguuacgucucgcgccuccaacagcgcugugccucccgccaccgucgaggcuuuuguggaaagagacucucugcacuucccgcauccugugaugaucuacgccaauguuaaacaaggcuuuuaccccauucugaacgcgacagucaccgccacaguggagccugaaaccggggaccccgugacgcuccggcugcuugaugacggagcuggcgccgaugucaucaagaaugacgggauuuauuccagauacuucuuuagcuucgcugccaacggacgcuauucucugaaagugcacguuaaucacagcccuuccaucagcacacccgcgcauucuaucccgggcucccacgccauguacgugccuggguauaccgcuaacggcaacauucagaugaaugccccgcggaaguccgucggaagaaacgaggaggaacgcaaauggggcuuuucccgggugucuagcgggggauccuucucuguucucggcgugcccgcugggccucauccggaugucuuucccccuugcaagaucauugaccuggaggccgugaagguugaagaggaacugacacuuagcuggaccgcccccggagaggauuucgaccagggccaggcuaccuccuacgagaucagaaugucuaaaagccuccaaaauauucaggaugacuuuaacaaugcgauccuggugaacacauccaagcgcaauccucagcaagccgggauccgggaaauuuucacguuuagcccccagaucucuaccaacggcccugagcaccagcccaauggagaaacacacgagucccauagaauuuaugucgcuauccgcgccauggaucggaacagccugcagucugccguguccaauauugcucaagccccucucuucaucccgcccaacagcgacccugugcccgcgagagauuaccugauccuuaaaggcguccugaccgcuauggggcucauuggaaucauuugccugaucauuguugugacacaccauacccugucucgcaagaaacgggccgacaagaaggaaaauggcacgaaacuucucuga

SEQ ID NO: 3128 - RNA, 708 nt, Artificial Sequence
  AAF82135 variant
auggaggaagagacccacacagacgccaagaucagagcugaaaacggcacggggagcucuccccggggaccuggcugcucccugcgccauuucgccugugagcagaaucuccugagcagaccggauggguccgcgucuuuucuucaaggagacaccagcgugcuggcuggcgucuacgggcccgccgaaguuaaaguguccaaggagauuuucaacaaagccacacucgaggugauccugcggccuaagauuggacuucccggcgucgcugaaaaaucucgcgagagacugauccggaauaccugcgaagccgugguucucggcacacugcacccucgcaccagcauuacagugguccuccaggugguuuccgaugcugggagccugcuggccuguugccuuaacgcggccuguauggcucugguggacgccggaguccccaugagagcucucuuuugcggcguggccugugcgcuggauucugacgggacccuugugcuggauccuacguccaagcaggagaaggaggcccgggcuguccucaccuucgcccuggacagcguugaacgcaaacugcucaugucuuccacaaagggacuguauagcgauaccgagcuucagcaaugccuggcugccgcccaggcugcgucucagcauguguuuagauucuaccgggaaucccuccagcgcagauauagcaaauccuga

SEQ ID NO: 3129 - RNA, 1752 nt, Artificial Sequence
  CCDS6312.1 variant
auggagguggccgcuaacugcagccugagagucaagcggccccuccuggacccucgcuucgaaggcuacaaacuuucccuggagccgcuccccuguuaucagcuggaacuugaugccgcgguugcugaggugaagcugagagacgaucaguacacccucgaacacaugcaugccuuugggauguauaauuaccugcacugcgacucuugguaucaggauagcguguacuauaucgacacacugggacggauuaugaaccucacggucaugcuggauaccgcccuuggcaaaccucgcgagguguucagacugcccacagaccucaccgcuugugauaaucggcugugcgccuccauccauuuuucuagcuccacauggguuacccuuucugacgggacaggacgccuguacgugauuggcaccggggagagaggaaacagcgcuuccgaaaagugggagaucauguucaaugaagaacucggcgauccuuuuauuaucauccacagcauuucucugcugaacgccgaggaacauuccaucgcgacgcuccugcuucggauugagaaagaggagcuggacaugaagggcagcggguucuacgucucucucgaaugggugaccaucuccaagaaaaaucaggauaacaagaaauaugagauuaucaagcgcgacauucugagaggaaaaagcguuccccacuacgccgcuaucgagccugacggcaaugggcuuaugaucgugucuuauaagucccugacauuuguccaggccggacaagaucucgaagagaacauggacgaagauauuagcgagaagaucaaagaaccgcuguacuauuggcagcagaccgaggacgaucugacagugaccauucggcuccccgaggacuccacgaaggaagauauccagauucaauuccugccugaccacaucaauaucgugcuuaaagaucaucaguuucuggagggcaagcucuacucuagcauugaccacgaauccagcacauggaucauuaaagagucuaacucccuggaaaucagccuuauuaagaaaaaugaggggcugaccuggcccgagcucgucaucggagauaagcagggcgaacugauccgcgacucugcucagugugccgcgauugccgagagacugaugcaucucacaagcgaggaacugaacccuaaucccgacaaggagaaaccgccuugcaacgcucaagaacuugaggaaugugauaucuucuuugaggaauccucuagccugugccgguucgacggcaacacccucaagaccacacacguugugaaucugggguccaaccaguaucuguuuagcgugauugucgaucccaaagagaugccuuguuucugccuucgccacgacguggaugcccuccuguggcagccccauucuuccaagcaagacgauaugugggagcacaucgcuacguucaaugcccugggauacguucaggccagcaaaagagacaagaaguuuuucgcuugugcgcccaacuacucuuaugccgcucucugcgaaugccugcggagaguguuuauuuaccgccagccugccccgauguccaccguccuuuauaaucggaaagagggcagacagguggggcaaguugccaagcaacagguggcuagccuggaaacaaacgaucccauccucggauuccaggccaccaaugagcgccuguuuguccugacaaccaaaaaccuuuuccucauuaaggugaauacggaaaacuga

SEQ ID NO: 3130 - RNA, 1563 nt, Artificial Sequence
  CCDS41288.1 variant
augagcucuccccuggccucccucagcaagaccagaaaagugccucugccguccgagcccaugaacccuggccggcgcgggaucagaauuuacggagacgaagaugaggucgacaugcuuucugauggcugcgggagcgaagagaagaucuccguucccucuuguuauggaggcauuggggcuccugugagccgccaggugcccgccucccacgacagcgaacugauggcguucaugacacggaaacucugggaucuggagcaacaggucaaggcucagacggacgagauccuuucuaaagaucagaagauugccgcccuggaagaccucgugcaaacccugagaccucauccggcugaggccacacugcagcggcaggaggaacucgagaccaugugcguucagcugcaacgccaggugagagaaauggagcgguuucuuuccgauuacggacugcagugggucggcgaacccauggaccaggaggauagcgaaucuaagacaguguccgagcacggcgagcgcgacuggaugaccgcuaaaaaguucuggaaaccuggggauagccucgcucccccugaaguugacuuugacagacugcuugcgucucugcaagaucucuccgagcugguggucgaaggagacacacaggugacccccgugccgggcggggcccggcugcgcacgcucgagccuaucccccugaaacuuuauagaaauggaaucaugauguucgauggcccuuuucagcccuucuacgaccccagcacccaacggugucugcgcgauauucucgacggguuuuucccuuccgaacugcagagacuuuauccgaacggaguccccuuuaagguuucugaucugcggaaucagguguaccucgaggacggccuggauccuuuccccggcgaggggagaguggucggacgccagcugaugcauaaggcucucgaccggguggaggaacacccuggcagcagaaugacagccgaaaaguuucugaaccgccuucccaaauucguuauccggcaaggggaggugauugauaucagaggaccgauucgcgacacccugcagaauugcuguccucuccccgcucggauccaggaaauugucguggagacaccuacccuggccgcggagagagaacgcucccaggagagccccaacacgccugcucccccgcuuucuaugcugcggaucaaguccgaaaauggcgagcaagccuuucuccugaugaugcagccugacaacacaaucggggauguuagagcccugcucgcccaggcccgcgugauggacgccagcgcuuucgagauuuucucuaccuuuccgcccacacuguaucaggaugacacccuuacccugcaagcggccggacucgucccuaaagcugcccugcugcuucgggccagacgggcucccaagagcucccucaaauucucucccggcccuugccccggcccugggcccggaccuagccccggcccggggccuggacccuccccuggccccgggccgggcccuagccccuguccuggacccucucccuccccucaguga

SEQ ID NO: 3131 - RNA, 429 nt, Artificial Sequence
  AAA88022 variant
auggccaccaagaucgacaaagaggcuugcagagccgcguacaaccuggugcgggaugacggcagcgcugucauuuggguuacauucaaguaugauggguccacgaucgugcccggagaacagggcgccgaguaccaacacuuuauucagcaguguaccgacgaugugcgccucuucgccuuugucagauucacaaccggggacgcuaugucuaaacggagcaaguuugcccugaucacauggauuggagaaaauguguccggccuucagcgcgcuaaaaccgggacagauaagacccugguuaaggaggugguccaaaacuucgccaaagaauuugugaucucugacagaaaggagcucgaggaagauuucaucaaaagcgagcugaagaaagcgggaggcgccaauuaugacgcucagacggaauga

SEQ ID NO: 3132 - RNA, 495 nt, Artificial Sequence
  CCQ43891 variant
auggccaccagagaccccuggguguggauggcuagcccugauuuccaggcccggaagggcaaacgcguccaccaagagacacuggcgccgggggaaacgaaggacaaaauggagcuccugggacuuagaggcccccuggaucuccuggggccuggagcccuucuggcuacccucggcaagauggcccccggggaacauaaagcucagcgggccccuaaggagucccccgacaagacagcucgcugggcccagagagauccucagggaccgcggguuucucuggaauaccuggagcgcagagcgaccaugggccaccaagccagccucgaccaucagggcccccgggcuucccagggggccuggggacugggcgagcgcacaguguggaccgugccucaggauagacgggggucucuugcuacagaagcccgcauggagcugcaaggacccggcgucccucaggcgagcagagccucccgggaaacccagugguga

SEQ ID NO: 3133 - RNA, 1623 nt, Artificial Sequence
  AAO18361 variant
augggccccggggagagagccggaggcgggggagacgcuggcaaggggaacgccgcgggaggcggcgggggaggccggagcgcuaccacagccgggucccgcgccgugucugcucugugccuccugcuuagcgucggauccgccgcugccugucugcuccugggcguucaggcggccgcccuucaagggagaguggcugcucuggaagaggaacgggagcuccugcgcagagccggaccuccgggcgcgcuggaugccugggcugaaccccaccucgagcggcugcuucgcgagaaacuggacggccucgccaagaucagaacggcucgggaagccccuucugagugcgugugucccccugggcccccuggacgcagaggcaaaccggggcggcgcggagaucccggcccucccgggcagagcggaagagacggcuacccuggcccccuggggcuugauggaaagccgggccugccugggcccaaaggagaaaagggcgccccuggggacuucggcccccggggagaucagggccaggacggggcugcgggacccccuggcccgcccgggccucccggagcccgcggcccucccggggauaccggcaaggacggaccgagaggcgcucaagggccugccggacccaaaggcgagccugggcaggauggagagaugggccccaaggggccucccggcccgaaaggagaaccuggcguccccgggaagaaaggagacgauggcacacccucccagccugggccgcccggaccuaagggcgagcccgggucuaugggcccucggggagaaaauggcguggacggggcccccggaccuaagggcgagcccgggcauagaggaaccgacggcgcugccggcccgcgcggggcgccuggacucaaaggcgaacagggggauacaguugugauugacuaugauggacggauccuggacgcucugaaggggcccccuggcccccaaggaccgccugggcccccuggcauucccggcgccaaaggagagcucggccugcccggggccccuggaaucgauggcgagaaggggccgaaaggacagaagggcgaccccggcgaaccugggcccgcuggacuuaaaggcgaggccggggaaaugggacugagcggccucccuggggcugauggacugaagggcgagaagggcgaauccgccagcgacucucuucaggagucccuggcgcagcucauugucgagcccgggccuccgggacccccugggcccccuggccccaugggacugcaaggcauccaggggccgaaaggacuggauggcgccaagggcgaaaaaggggcuagcggagagagaggcccuucugggcuccccggacccgugggcccucccgggcugaucggacuuccuggcaccaagggcgaaaaagggcgcccgggagagcccggccuggacggguuuccuggaccccggggcgaaaagggggauagauccgagcgcggagagaagggcgaacggggcguuccugggagaaaaggagugaagggccagaaaggggagcccggaccgccuggccucgaccaacccugcccugucgggcccgacggccugccugugcccggauguuggcacaaguga

SEQ ID NO: 3134 - RNA, 492 nt, Artificial Sequence
  CAG25548 variant
augcuggccagagcucuccugcuuugcgccgugcuggcgcucagccacaccgcuaaccccuguugcucccauccuugucagaaucggggcgucugcaugucuguuggguucgaccaauacaagugugauugcacccgcacgggauuuuauggcgagaacuguagcaccccggaauuucugacaagaaucaaacuuuuccugaagcccaccccuaauacagugcacuacauucucacccauuucaaaggguuuuggaacguggucaauaacauccccuuccugcggaaugccauuauguccuaugugcugacaucucgcagccaccucaucgacuccccucccaccuacaacgccgauuauggauacaagucuugggaggcuuuuagcaaucuguccuauuacacgagagcccuuccuccgguucccgacgauugcccuacaccccugggcgugaaagcucuccaugccagcgucuuccaggaccggucuuga

SEQ ID NO: 3135 - RNA, 1632 nt, Artificial Sequence
  AAC50809 variant
augggcaccagccugucccccaacgacccuuggccgcucaauccccugucuauccagcaaacaacgcuucugcuccugcuuagcgugcuggccaccguccacguugggcagagacuccugcggcagcgcagacggcagcugcgcuccgcuccucccggaccuuucgccuggccccucauuggcaacgcggcugccguggggcaagccgcucaucugucuuuugccagacuugcucggcgcuacggagauguguuccagaucagacugggcagcugcccuauugucgugcucaauggggagcgggccauccaccaggcgcugguucagcaaggauccgccuuugcugaccgcccggccuucgcuucuuuuagaguggucagcggcggccgguccauggccuucgggcauuauagcgaacacuggaaggugcagcgcagagcggcccauucuaugaugcggaacuuuuucacacgccagcccagaucccggcagguucuugagggacacgugcugagcgaagcuagagagcucgucgcccugcuggugcgcggcucugcugauggggccuuucucgacccucggccccugaccguggucgccguugcuaaugugauguccgcgguguguuucggaugcagauacagccacgaugacccugaauuucgcgagcuucugucucauaacgaggaguucggccggacagucggggccggaucccucguggauguuaugcccuggcugcaauauuuuccgaauccugugagaaccgucuuccgcgaguucgaacagcuuaaccggaauuuuagcaacuucauucuggacaaauuucucagacacugugagucccugcgccccggcgcugccccucgggauaugauggacgccuucauccugucugcugagaagaaagccgcgggcgauagccaugggggaggcgcuagacucgaccuggaaaaugugcccgccacaaucaccgauauuuuuggggccucccaggacacgcuuagcaccgcucugcaauggcuccugcuucuguucacacgcuaccccgacguucagacccgggugcaggccgagcucgaucaggucgugggaagagaccggcugccuugcaugggcgaucaaccgaaccugcccuauguccucgcuuuucuguacgaagccaugcgcuucucuuccuuugugccuguuacaaucccccacgcgaccacggccaauacaagcgugcuuggguaucacauuccuaaggacaccgucguguucguuaaccaguggucugugaaucaugauccccugaaauggccgaacccugagaacuuugaccccgcuagauuccucgauaaggacggacugaucaauaaggaucugacaagccgggucaugauuuuuagcgugggcaaaagacgcuguaucggcgaagaacuuucuaagaugcaacucuuccuguucauuagcauccuggcccaccagugcgacuuucgggcuaacccuaaugagcccgccaaaaugaacuucuccuacgggcucaccaucaagccuaaauccuuuaaggugaauguuacccugagagaaucuauggagcuucuggauuccgcgguccagaaccuccaggccaaggaaacaugucaguga

SEQ ID NO: 3136 - RNA, 333 nt, Artificial Sequence
  NM_001129828 variant
auguggaugggccugauccagcucguggagggggucaagagaaaagaccaaggauuccuggaaaaggaguuuuaccacaaaaccaacauuaagaugcggugcgaguuccuugccuguuggcccgcuuuuacaguucugggcgaagccuggcgcgaucagguggacuggagcagacuccugcgggaugcggggcuugugaaaaugucccgcaagccuagagcuucuagcccgcuguccaauaaccaucccccuacgcccaagcgguucccucgccagcccggaagagaaaaaggcccuaucaaggaggucccggggaccaaaggaucucccuga

SEQ ID NO: 3137 - RNA, 384 nt, Artificial Sequence
  NM_001129826 variant
auguggaugggccugauccagcucguggagggggucaagagaaaagaccaaggauuccuggaaaaggaguuuuaccacaaaaccaacauuaagaugcggugcgaguuccuugccuguuggcccgcuuuuacaguucugggcgaagccuggcgcgaucagguggacuggagcagacuccugcgggaugcggggcuugugaaaaugucccgcaagccuagagcuucuagcccgcuguccaauaaccaucccccuacgcccaagcggcgcggaucuggcagacacccucucaaucccgggccugaagcccugagcaaauucccgcggcagcccggacgcgagaagggcccuaucaaagagguccccggcaccaagggguccccuuga

SEQ ID NO: 3138 - RNA, 570 nt, Artificial Sequence
  AAI40914 variant
augaccgacaagacagagaaaguggccgucgaucccgaaacgguuuucaagagaccucgggagugcgacagcccguccuaccagaaacgccaaagaauggcucugcucgcccggaagcagggcgcgggggauucucugaucgcuggaagcgccauguccaaagccaagaaacuuaugaccggccacgcuauucccccuucucagcuggacagccagaucgaugacuuuacaggguucuccaaggaucgcaugaugcaaaagcccggaucuaacgccccugugggcgggaaugugaccagcuccuuuagcggagacgaucucgaauguagagagacagcuucuucccccaaaagccagcgggaaauuaacgccgacaucaagcgcaaacuggucaaggagcuuagaugcgugggccagaaguaugagaaaauuuucgaaaugcuggagggcguucaggggccuaccgcggugcggaagcgcuuuuucgaaucuaucaucaaagaggccgcuagauguaugcggcgcgauuuugucaagcaucucaaaaagaaacugaagagaaugauuuga

SEQ ID NO: 3139 - RNA, 795 nt, Artificial Sequence
  AAH20662 variant
augcugagacuccugcggcuugcccuggcuuucuacggccgcaccgccgaccccgcggagagacaggggccucaacagcagggacucccgcagggcgauacacaacugacgaccgugcagggggucguuaccagcuuuugcggagacuauggcaugaucgaugaauccauuuacuucucuagcgacguggugacagggaacgucccccuuaaggugggacagaaaguuaauguggucguggaggaagauaagccucacuauggccugcgggcuaucaaaguugacguggucccccgccaucucuacggcgccgggccuuccgauucuggaacaagagugcugauuggcugugugaccagcaucaacgaggacaauauuuauaucuccaacucuaucuacuuuagcauugccaucgucuccgaagauuucguucccuauaagggggaccugcucgagguggaguacagcacagaaccuggaauuucuaauaucaaagcuaccuccgugaagccgauucggugcauccacacggaggaagucuguauuaccagcgugcauggccgcaacgggguuaucgauuacacaaucuuuuucacccuggacucugugaaacuucccgauggauaugucccucagguggacgacauuguuaauguggucaugguggaguccauccaauuuugcuucauuuggagagccaucagcauuacacccguccacaagucuuccagcggcuuucaggaugacggcgggcugggacggccuaagcgcgagagacggucccagucuaucuga

SEQ ID NO: 3140 - RNA, 2844 nt, Artificial Sequence
  CCDS735.1 variant
augagccugcccuccagacagaccgccaucauugugaacccuccgcccccugaguacaucaauacaaagaaaaacggccggcucacgaaucaacugcaguaucuucagaaggucguucugaaagaccucuggaagcacucuuucagcuggcccuuucagcgcccuguggaugcugugaaacugcaacuucccgacuacuauaccauuaucaagaacccuauggaucugaauacaauuaagaaaagacucgaaaacaaguacuaugccaaagcguccgagugcaucgaagacuucaauaccauguuuucuaacuguuaccuguauaauaagccgggggaugacaucguccugauggcucaggcccucgagaaacuguucaugcagaagcucagccagaugccccaagaagaacaggugguuggagugaaggagcggauuaaaaagggcacacagcagaacaucgccgucuccucugcuaaagaaaagagcuccccuagcgccaccgagaaaguguuuaagcaacaggaaauucccucuguuuucccuaaaacauccaucagcccccugaaugugguccagggggcuucugugaacuccagcucucaaaccgccgcccaggugacgaagggagucaagcgcaaagcggauaccacaaccccggcuacauccgccguuaaggcuagcuccgaguuuucuccuaccuucacggagaaaagcguggcccuucccccuauuaaggaaaauaugcccaaaaacgugcugcccgacucccagcagcaauacaaugucgugaagacaguuaaggugaccgagcagcuuagacauugcagcgaaauccugaaagagaugcucgcgaagaaacacuuuucuuacgccuggccuuucuauaacccggucgaugugaacgcucugggccugcauaauuacuaugacguugugaagaaccccauggaucucgggacaauuaaagaaaagauggacaaucaggaguacaaggaugccuauaaauuugcugccgacguccggcugauguucaugaacuguuacaaguauaauccucccgaccacgagguggucaccauggcccgcaugcuucaggauguguuugaaacccauuucuccaaaaucccuaucgagcccguugaaagcaugccgcugugcuacauuaagacagacaucacggagaccacaggaagagaaaacaccaaugaggcuucuagcgagggcaacuccucugaugacagcgaagaugagcgggugaaacgccucgcgaagcugcaagaacagcuuaaggccguccaccagcagcugcaagugcucucccagguuccuuucagaaaacugaauaagaaaaaggagaaaagcaagaaagaaaagaagaaagagaaggugaacaauucuaacgagaauccccggaaaaugugugaacagaugcgccugaaggagaaauccaagagaaaccagccuaagaaacggaagcaacaguuuauuggccucaaaagcgaagacgaggauaaugcuaagcccaugaacuacgacgagaaacgccagcugucucuuaacaucaauaagcugccuggggauaagcucggaagagucgugcacauuauccaaucccgggaacccagccuguccaacucuaauccggacgagaucgaaauugauuucgagacacuuaaagccagcacccugagagaacucgagaaguauguguccgccugccugcgcaaacggccucugaagccucccgcuaaaaagaucaugaugucuaaggaggaacuccauagccagaaaaagcaggagcuggaaaagagacuucuggacguuaacaaucagcucaacucccgcaagcggcaaacgaaaagcgacaagacacagcccucuaaagccgucgagaauguguccagacugagcgaaucuuccagcucuagcuccucuagcuccgagagcgaguccucuagcuccgaucugucuagcuccgacucuagcgauuccgaaagcgagauguuuccgaaguucaccgaagugaagcccaacgacucuccuuccaaagagaaugucaagaaaaugaagaacgaauguauucccccugagggccgcaccggggugacacagaucggauacugcguucaggauaccacaagcgcgaauacgacccuugugcaccaaacaacccccucucaugucaugccucccaaccaccaccagcucgcuuuuaauuaucaggagcuggaacaucugcagacagugaaaaacauuuccccgcuccaaauccugccucccagcggcgacucugagcagcuuuccaaugggaucaccguuaugcacccuagcggagauuccgacacgaccaugcuggaaagcgagugucaggcccccgugcaaaaggauauuaagaucaaaaacgccgacucuuggaaaagccucggcaaaccggucaagccuuccggcgugaugaaaucuagcgaugagcuguucaaccaguuucggaaggcugccauugaaaaggagguuaaagcuagaacacaggaacugauccgcaagcaucuugagcagaauaccaaagaacucaaggccucccaagagaaccagcgggaccuggggaauggacugacaguggagucuuucagcaacaaaauucagaauaagugcuccggcgaggagcagaaggaacaccaacagucuagcgaggcgcaggauaaauccaagcucuggcugcuuaaagacagagaccuggcccgccagaaggaacaagagcggagacggcgcgaggcuauggucgggaccaucgauaugacgcuccagagcgacauuaugacaauguuugaaaacaauuucgauuga

SEQ ID NO: 3141 - RNA, 543 nt, Artificial Sequence
  CCDS35455.1 variant
augcaggccgagggcagagggaccggaggcagcacaggggacgcugauggacccggcgggccuggaaucccggacggccccggcgggaacgccggaggcccuggggaagcgggagcuacgggcgggcggggaccccgcggcgccggcgccgcuagagccuccgggccucggggaggcgcuccccgcgggccucacggaggcgccgcgucugcccaagaugggagaugcccguguggagcucggcgccccgacagcagacugcucgagcugcauauuaccaugccuuucuccucucccauggaagccgagcuugugcggcgcauccugagcagagaugcugccccucucccccggccgggcgcgguccugaaggacuuuacaguuuccggcaaucuucuguucauucgccucaccgccgcugaucacagacagcugcagcugucuaucagcuccugccuccagcaacugagccuucugauguggauuacacaguguuuucucccuguguuccuggcccaggcucccucugggcagcggcgcuga

SEQ ID NO: 3142 - RNA, 633 nt, Artificial Sequence
  CAA10196 variant
augcaggccgagggccaagggaccggaggcagcacaggggacgcugauggacccggcgggccuggaaucccggacggccccggcgggaacgccggaggcccuggggaagcgggagcuacgggcgggagaggaccccggggcgccggcgccgcucgcgccuccgggccuagaggaggcgcuccccgggggccucacggaggcgccgcgucugcccaggaugggcgcugcccguguggagcuagacggcccgacagccgccugcuccagcugcauauuaccaugccuuucuccucucccauggaggccgaacuugugagacggauccugagccgcgaugcugccccucuccccagaccgggcgcgguccugaaggacuuuacaguuuccggcaaucuucuguucaugucugugcgggaucaggaccgcgagggggccggaagaaugcggguggucggcugggggcucggaagcgcuuccccugaaggccaaaaagcccgcgaucugagaacccccaagcacaaagugagcgagcagcggccugggacacccggacccccuccgcccgagggcgcucagggcgacgggugcagaggaguugccuuuaacgugauguucucugccccucauauuuga

SEQ ID NO: 3143 - RNA, 1992 nt, Artificial Sequence
  CCDS13459.1 variant
auggccgcuaccgagaucagcgugcuguccgaacaguucacaaagauuaaagagcucgaacugaugcccgagaagggccuuaaagaagaggagaaggacggggucugcagagaaaaagaucaccggucuccuagcgagcuggaagccgagcgcacguccggagcguuucaagacucuguucucgaggaagagguggaacuggugcuugcuccgagcgaggaauccgagaaguacauccugacccuccagacaguccauuucaccucugaggccguggaacugcaggauaugagccugcucuccauucagcaacaggagggcguucagguggucgugcagcaacccgggccuggacugcuuuggcuggaagagggccccagacagagccuccagcaguguguugccaucucuauucaacaggaacuguauuccccucaggagauggaggugcuucaauuucacgcucuggaagagaacgucaugguggccagcgaagacucuaagcucgcugugucccuggccgagacaaccgggcugaucaaacucgaagaggagcaggaaaagaaucagcugcuugcggagcggacaaaagaacagcuguucuuugucgagaccaugagcggagaugagcgcucugacgaaaucguucucacgguguccaacagcaauguggaggaacaagaggaucagcccaccgccggccaggcugacgccgaaaaggcuaaauccacaaagaaccagagaaagaccaaaggcgccaaggggacauuccauugcgaugucuguauguuuaccucuagccggauguccagcuucaaucgccacaugaaaacgcauacaucugagaagccucaccugugccaccuuugucugaaaaccuuuagaacagugacccuccugcggaaccauguuaauacccacacaggaacgcgcccguacaagugcaacgacuguaauauggcguucgugaccuccggcgagcuggucagacaucggcgcuauaaacacacacacgaaaagcccuuuaagugcagcauguguaaauacgccucuguggaggcuagcaagcucaaaagacauguucggucccacaccggggaacgcccuuuccaaugcugucagugcucuuaugccagcagagauacauacaagcugaaacggcauaugagaacccacuccggagagaagcccuaugaaugccauauuugucacacgcgcuuuacacagagcggcaccaugaagauccacauucuucagaaacauggggagaacgugccuaaguaccaaugcccccacugugcuaccaucauugcccggaaaucugaccugagaguccauaugcgcaaucuccacgccuacuccgcugcggagcugaagugccgguauuguagcgccguguuccacgaaagauacgcucuuauccagcaucagaaaacacacaagaacgagaagcgcuucaaaugcaagcauuguucuuaugccugcaaacaggaacggcacaugaccgcccauauuagaacacacacgggagagaagccguuuaccugucuguccugcaauaaauguuuccgccaaaagcagcuccugaacgcucacuuucggaaguaccaugaugccaauuucaucccuacagucuauaaaugcagcaagugcggcaaaggcuuuuccagauggaucaaccugcaccgccauucugaaaagugugggagcggagaggcgaaauccgcugccucuggcaaggggcggagaacccggaaacgcaagcagacaauucucaaggaggccaccaaaggacaaaaggaagcugccaaaggcuggaaggaggcugccaacggggacgaagcggccgcugaggaggccagcacgaccaaaggagaacaguuccccggcgagauguuuccuguggcuugcagagaaacaaccgcccggguuaaggaggaaguggacgagggcgucacaugugagaugcugcuuaauaccauggauaaguga

SEQ ID NO: 3144 - RNA, 2148 nt, Artificial Sequence
  CCDS11368.1 variant
augagccaggugauguccucuccccugcucgccggcgggcacgcugucagccuggccccuugcgacgagccgagacggacccuucaucccgcgccuucccccucucugccuccccaauguagcuacuauacaacggaaggauggggcgcucaggcccucauggccccuguuccgugcauggggcccccuggacgccugcagcaggcuccccaaguggaggccaaggcuaccuguuuccuuccuucccccggcgaaaaagcccuggggacaccggaggaucucgacucuuacaucgauuuuagccuggaaucccugaaccagaugauucucgagcuggacccuaccuuccagcuucugcccccuggaacaggcggcagccaggcggagcucgcccaaucuaccauguccaugagaaagaaagaagagagcgaagcucuggauaucaaguauauugaggugacaucugcccggucccgcugccacgacgggccccagcauuguagcucucccuccgucaccccuccguuuggaagccuuagauccggcgggcugcuccugucucgggaugugccccgcgagacgagaagcuccagcgaaucucugaucuucuccggaaaucagggccgggggcaccagcgcccucuucccccuagcgagggacugucucccagaccgccuaacagccccuccauuucuaucccuugcaugggcagcaaggcuuccagcccccauggccuugggucuccucugguugccagcccccggcucgaaaaacgccugggaggccuugcgccgcaaagagggucccggaucucugugcuguccgccagcccugucuccgacgugucuuacauguuuggaagcucccagucucuccugcacagcuccaauagcucucaccaguccagcucucgcucccuggagagccccgcuaacucuagcuccagccuccauucucugggcuccguuagccuuuguaccagacccuccgauuuccaagccccucggaauccgacacugaccauggggcagcccagaacaccucacucucccccucucgcuaaggaacaugccagcuccugucccccuucuauuaccaacagcaugguggacauccccauuguccugaucaauggaugcccggagccuggcuccucucccccucagcgcacgcccggccaccagaacagcgugcaaccgggggccgcuuccccuagcaaucccugcccugcgacacggucuaacucccagacccuuagcgaugcccccuuuacaaccugucccgagggaccugcuagagacaugcagccgaccaugaaauucgugauggauacaucuaaguauugguuuaaacccaauauuacgcgcgaacaggccaucgagcugcuccggaaggaagaaccuggcgccuucgucauuagagacuccagcucuuaccgcggguccuuuggacuggcucugaaaguucaagaagugcccgccagcgcgcagucccggccuggcgaggacagcaacgaucucaucagacacuuccugaucgagucuagcgcuaagggggugcaucuuaagggcgccgacgaggagcccuauuuuggaucccugucugccuucgucugccagcacagcauuauggcucucgcccugccuugcaaacugaccaucccgcagcgcgaacuuggcggggcugauggagccuccgacucuacagauagccccgcguccugucaaaagaaaucugccggcugccauacccucuaccugagcuccgugagcguugagacacugaccggggcucucgccgugcagaaggcuauuucuacgacauucgaacgggacauccugccuacccccaccgucgugcacuuuaaaguuacagagcagggaauuacccuuacagaugugcagagaaaggucuucuuucgccggcauuacccucugacgacccucagauucuguggcauggaccccgagcaacggaaauggcagaaguauugcaagccguccuggaucuuuggguucguggccaaaagccagacagaaccucaagagaaugucugucaccuguuugcggaauacgauauggugcagcccgccucucagguuaucggccuggugaccgcucuccuccaggacgccgagcgcauguga

SEQ ID NO: 3145 - RNA, 1302 nt, Artificial Sequence
  AAH06510 variant
auggcccugagagugacccggaacagcaagaucaaugcugagaacaaagccaagauuaauauggcgggcgcuaaacgcguccccacagccccugccgcuacguccaagccggggcucagaccccggaccgcccugggagacaucggcaacaaaguuucugaacagcuucaagcuaagaugccuaugaagaaagaggccaagcccagcgcgacagggaaagugauugauaagaaacugccuaagccccucgaaaaggugccuaugcuggucccggugcccguuuccgagccugugcccgaaccugagcccgagccggaaccugagcccgucaaagaagagaaacuuucuccugagcccauccugguggacaccgccagccccuccccuauggaaacaucuggaugcgcuccggccgaggaagaucucugucaggcuuucagcgacguuauucuggccgugaaugaugucgacgcggaggauggcgccgaccccaaccugugcuccgaauacgugaaggauaucuaugcuuaccuccgccagcuggaggaggaacaggccgugagaccuaaguaucuucuggggcgggaggucaccggaaauaugcgcgcuauccucauugacuggcugguucaagugcagaugaaauuuagacuucugcaggaaacaauguacaugaccgugagcaucauugaucgguucaugcagaacaauuguguccccaagaaaaugcuccaacuggugggcguuacggccauguuuaucgccucuaaguaugaggaaauguacccucccgagauuggcgacuucgcuuuugugaccgauaacacauauaccaagcaccagauccgccagauggagaugaaaauucugagagcgcucaauuucgggcugggacggccgcuuccucugcauuuucuccgcagagccuccaagaucggcgaagucgacguggagcagcacacacuggcuaaauaccuuauggaacugaccaugcucgacuacgauaugguucauuuucccccuagccaaaucgccgccggggcuuucugccuggcccugaagauucucgacaacggagaguggacgcccacacugcagcacuaucuuucuuacaccgaagagucccugcucccugugaugcagcaucuggcgaaaaaugucgugauggucaaccaaggccuuacaaagcacaugaccgugaagaauaaauaugcuaccagcaagcacgccaaaaucucuacacugccccagcucaacuccgcccugguucaggaucuggcuaaggccguggcuaaagucuga

SEQ ID NO: 3146 - RNA, 888 nt, Artificial Sequence
  AAA58392 variant
auggagcaccagcugcucugcugugaaguggagaccaucagacgggccuaccccgacgcuaaccugcuuaaugaucgcguccugagagccaugcucaaggcggaagagacaugcgcuccuagcguuuccuauuucaaaugugugcaaaaggaagugcugccgucuaugcggaaaauugucgccacguggaugcuugaggugugcgaggaacagaagugugaggaagagguuuuuccccuggccaugaacuaccucgaccgcuuccugagccuggagccugugaaaaaguccagacuccagcugcuuggcgcuaccugcauguuugucgccucuaagaugaaagaaacaaucccccugaccgcugagaagcucuguauuuauacagauaauagcauccggccugaggaacugcuucagauggaacugcuccuggugaacaaacugaaguggaaucucgccgcgaugacaccccaugacuucauugagcacuuucuguccaaaaugccugaggccgaagagaacaagcaaaucauccgcaagcaugcucagaccuucguugcccuuugcgcuaccgaugugaaauuuauuucuaauccgcccagcauggucgccgcgggguccgugguggccgcuguccagggacugaaccucagaagcccuaauaacuuccugucuuacuaucggcuuacgcgcuuucuguccagaguuaucaagugugaccccgauugccuccgggccugucaggaacaaauugaggcucugcuggaaagcucucuccgccaggcccagcagaauauggacccuaaagccgcugaggaggaagaggaagaggaagaggagguggaucuggcgugcacccccacagacgugagagaugucgacaucuga

SEQ ID NO: 3147 - RNA, 651 nt, Artificial Sequence
  AAA36601 variant
augcugagacucagcgagcggaacaugaaggugcugcuugccgcugcccugaucgcgggcuccgucuucuuucuccugcuucccgggccuucugcugccgacgagaaaaagaaaggaccgaagguuaccgugaaaguguacuucgaucugcgcauuggcgacgaagaugucgggagagugaucuuuggacucuucggcaagacaguucccaagacgguggacaauuuugucgcccuggcuaccggggaaaaaggauucggcuauaagaacagcaaauuucaccgggugauuaaggauuucaugauccagggcggggacuuuacacgcggagauggcaccgggggaaaauccauuuacggcgagagauucccugacgaaaauuuuaagcugaagcauuaugggcccggauggguuucuauggccaacgcuggcaaagauacaaauggcagccaauucuuuaucaccacagugaagaccgccuggcucgacgggaaacacgucguguucggaaaggugcuggagggcauggaggucguucggaaaguggaauccacgaagaccgauucucgcgacaaaccucuuaaggaugugaucauugcggacugcgggaagaucgaggucgaaaaacccuucgccauugcuaaggaguga

SEQ ID NO: 3148 - RNA, 1044 nt, Artificial Sequence
  AAD10634 variant
augcccagaggccaaaagagcaaacugcgggcccgcgagaagagacggaaagcucgcgaagagacccaggggcucaagguggcccacgcgacagcugccgaaaaagaggaaugcccuuccucuagcccgguccugggagacacgcccaccuccucuccugccgcuggcaucccccagaagccucagggggcucccccuacaaccacagccgccgcggccguuagcuguaccgaguccgaugagggagcuaagugccagggcgaagagaacgccucuuucagccaagcuacaaccuccacggaaagcucugugaaagacccgguggccugggaggcggggaugcuuaugcauuuuauucugagaaaguacaaaaugcgggagcccaucaugaaggccgauaugcucaaagucguggacgaaaaguauaaggaucacuucaccgagauucugaauggagcuucccgcagacuugaacugguuuuuggccucgaccugaaagaggauaacccuagcggccauacauacacccuggugucuaagcucaaucugacaaacgacgggaaucuuuccaacgauugggacuucccccggaauggacugcucaugccucugcuuggcgucaucuuucugaaagggaacagcgccaccgaagaggagauuuggaaguucaugaaugugcucggagcuuaugauggcgaggaacaccugaucuacggggaaccccgcaaauuuaucacgcaggaccugguucaggagaaguaucucaaauacgaacaggugccgaacucugauccucccagauaucaauuccuguggggaccucgggccuacgccgagacaaccaagaugaagguccuugaguuucuggcuaaaaugaauggcgcgacaccccgcgacuuccccucccauuacgaagaggcccucagagacgaagaggaacgggcucaggugcgcagcuccgugagagcccggagacgcaccaccgccacaacguuucgggcuagaucucgcgccccuuucagccgguccagccacccgauguga

SEQ ID NO: 3149 - RNA, 2436 nt, Artificial Sequence
  BAF91373 variant
auggagagccagggcgugcccccugggccguacagagccaccaagcuguggaacgaagucacaacguccuuccgggcuggaaugccccuccgcaaacacagacaacauuuuaagaaauauggcaauugcuucaccgccggggaggcgguugacuggcuguacgaucuucugcggaacaauucuaacuuuggaccugaagugacacgccagcagaccauccagcuccugagaaaguuccuuaaaaaucacgugauugaggacaucaagggccggugggggagcgaaaacgucgaugacaauaaccaacuguuucgcuuccccgcuacauccccucucaagacccugcccagacgguauccugagcugcgcaaaaauaacauugagaauuuuucuaaggauaaagacagcaucuucaagcucagaaaccugucccggcgcacaccgaaaagacauggacuucaccugucucaggaaaauggcgagaagauuaagcaugaaaucaucaacgaggaucaggagaaugccauugacaaccgggaacucagccaggaggauguggaagagguuuggcgcuacgugauccugauuuaucuucaaaccauccugggcguccccucccucgaagaggugauuaacccuaaacagguuaucccccaguacauuauguauaauauggccaacacgagcaagagagggguggucauccugcagaauaaaucugacgaucugccucacugggugcucuccgcuaugaagugucuggccaacuggccccggagcaaugacaugaacaauccgaccuacgugggauuugagagagaugucuuccgcacaaucgcugacuacuuucuugaccugccugaaccccuccugaccuucgaguauuacgaacuuuuuguuaacauucugguggugugcggcuauaucacagucucugaucgguccagcgggauucacaaaauccaagacgauccucagucuuccaaguuccuccaucugaauaaccugaauagcuucaaauccaccgagugucuccugcuuucucugcuccacagagaaaagaacaaggaggagagcgacuccacggaacgccugcagauuagcaaucccggauuucaagagcggugcgccaaaaagaugcagcuugugaaccugagaaaucgccggguuucugcgaacgauaucaugggcggguccugucauaaccucaucggacugagcaauaugcacgaccugucuagcaacuccaaacccagaugcuguucucucgaaggcauuguggaugucccuggcaauagcuccaaggaggccagcucuguguuccaccaguccuuuccgaacaucgaagggcagaauaacaaacuguuccuugagagcaagcccaagcaagaguuucugcucaaucugcauucugaagagaacauucagaaaccuuucuccgcuggauuuaagcgcacaagcacccugacaguucaggaccaggaggaacuuugcaauggcaaauguaaguccaaacaacucugccggucucagagccugcugcucagauccucuacccgccggaacagcuacaucaauacccccguggccgagauuaucaugaagccuaacgucgggcagggauccacaagcgugcagacggcuauggaaucugagcugggcgaauccagcgccaccaucaauaagagacuuuguaaaucuacaauugagcuguccgaaaacagccuccugcccgcgucuagcaugcugaccgggacacaaucccuucuccagccgcaccuggagcgggucgccaucgaugcucugcagcucugcugccugcuucugccucccccuaaucgcagaaagcuccagcugcugaugcggaugauuagcagaaugucucaaaacguggacaugcccaaacuucaugaugccaugggaacccgcucccucaugauccacacguucagccgguguguucugugcugugcugaggaaguggaccuggacgagcuccuggccggcagacuugucuccuuucugauggaucaucaccaggaaauucuccaggugccuucuuaucugcaaacagccguugagaagcaccuggacuaccuuaaaaagggccauaucgaaaaccccggggauggacucuucgcuccgcugccuaccuauagcuacugcaagcagauuuccgcgcaggaguuugacgagcagaaagugucuaccagccaagccgcuaucgccgaacugcucgagaauaucauuaagaaccgcucccugccccuuaaagaaaagcggaaaaagcugaaacaguuccagaaggaguacccccucaucuaucagaagagauuuccuacaaccgaaucugaggccgcucuguucggcgauaaaccgacaauuaagcaacccaugcugauccuucgcaaaccuaaguucagaagccugcgguga

SEQ ID NO: 3150 - RNA, 297 nt, Artificial Sequence
  AAA46940 variant
augcacggcgacacccccacacugcaugaguacaugcucgaucugcagccugaaacgaccgaccuuuauugcuacgagcaacugaacgauagcuccgaagaggaagacgagaucgaugggccggccggacaggcugagcccgacagagcccacuauaauauugugacauucuguugcaagugugauucuacccuccggcugugcguccagagcacacauguugacauccgcacccuugaagaucugcucaugggcacacuggggauuguguguccuaucugcucccagaaacccuga

SEQ ID NO: 3151 - RNA, 318 nt, Artificial Sequence
  AAA46947 variant
augcacggccccaaggccacccugcaggacaucgugcuccaucuggagccucaaaacgaaauuccggucgaucuucugugccacgagcagcucagcgacuccgaagaggaaaaugaugagaucgacgggguuaaccaucagcaucugcccgcuagacgggccgagccucagcgccacacaaugcuuuguaugugcuguaaaugcgaagcgagaauuaagcuggugguggagucuagcgcugaugaccuccgggccuuccaacagcuguuucugaauacgcucuccuucgucugucccuggugcgccucucagcaguga

SEQ ID NO: 3152 - RNA, 297 nt, Artificial Sequence
  AAA46951 variant
augagaggcgagacccccacacugcaggacuacgugcucgaucugcaaccugaagccacggaccuucacugcuaugagcagcugccggauagcuccgacgaagaggaugucaucgacucucccgcugggcaggccgaaccugauaccagcaacuacaauauuguuacauucuguugccaguguaaguccacccuccggcugugcgugcaaucuacacagguggacauccgcauucuucaggagcugcucaugggcagcuuuggaaucgucugucccaacugcuccaccagacuguga

SEQ ID NO: 3153 - RNA, 294 nt, Artificial Sequence
  AAA46959 variant
augagaggccacaagcccacccugaaagaguacgugcucgaccuguauccugaaccgacagaucuuuacugcuaugagcagcugagcgacuccucugaugaagacgaggggcucgaucggcccgacggacaagcccagccugcuacggccgauuacuauaucgucaccuguugccauacauguaacaccacaguucgccugugcgugaauagcaccgcguccgaccuuagaacaauucagcagcugcucaugggcaccgugaacaucgucugucccacgugcgcucaacaguga

SEQ ID NO: 3154 - RNA, 300 nt, Artificial Sequence
  AAA46967 variant
augcacggcgagaucaccacacugcaggacuacgugcucgaucuggaacccgaggccacggaccuuuauugcuacgaacaacugugugauagcuccgaggaagaggaggacaccauugaugggccugcuggacaggccaagccggacacaucuaacuauaauaucgucaccagcugcuguaagugcgaagcgacacucagacuguguguucaguccacccauauugauauccggaaacuugaggaccugcucaugggcacauucgggauugugugccccggauguucucagcgcgcuuga

SEQ ID NO: 3155 - RNA, 330 nt, Artificial Sequence
  AAA47051 variant
augagaggccccaagccuacccugcaggagaucgugcucgaccugugcccguacaacgaaauucaacccgucgaucuuguuugucacgagcagcugggggaaagcgaggacgaaaucgaugagccugaccaugccgugaaucaccagcaucagcuccuggcucggcgcgaugagccccaaagacacacaauucagugcuccuguugcaaauguaacaauacgcuucagcugguggucgaagccucucgggacacccuccgccagcugcaacagcuguucauggauagccucggauuugugugcccuuggugugcgacagcuaaccaguga

SEQ ID NO: 3156 - RNA, 321 nt, Artificial Sequence
  CAA52574 variant
augcacggccccagagagacccugcaggaaaucgugcuccaucuggagccucagaacgaacuugacccggucgaucugcucugcuacgagcagcugagcgaauccgaggaggaaaaugacgaggccgaugggguuucucacgcucagcuucccgcccggcgcgcggaaccucagagacauaagauucugugugugugcuguaaaugcgacggacggaucgagcucacaguggagagcuccgcugaagaucugcgcacgcugcaacaacucuuccugucuacccuuagcuuugucugucccuggugcgccacaaaccaguga

SEQ ID NO: 3157 - RNA, 306 nt, Artificial Sequence
  M62877.1 variant
augagaggcaacgugccccagcugaaggacgucguucuccaccugaccccucaaacagagaucgaucuucagugcuacgaacaguucgacagcuccgaggaagaggaugaaguggacaauaugcgggaucagcugccggagcgcagagccgggcaagcuacguguuaucggauugaggcccccugcugucgcugcucuagcgugguccagcucgcgguggaauccucuggagacacccugagaguugugcagcagaugcuuaugggcgagcugagccucgucuguccuugcugugcuaacaauuga

SEQ ID NO: 3158 - RNA, 300 nt, Artificial Sequence
  CAA52586 variant
augagaggcgacaaggccaccaucaaagauuacauucuggaccuccagcccgagacaacggaucugcacugcuaugaacaacuuggggacagcuccgaugaggaagacaccgauggaguggaccggccugauggccaggcugagcaggccacaucuaacuacuauaucgucaccuacugucauagcugcgacuccacacugcgccucuguauucacucuaccgcgacagaucugagaacccuucagcaaaugcugcucgggacgcugcagguugugugcccgggaugugcucggcuguga

SEQ ID NO: 3159 - RNA, 318 nt, Artificial Sequence
  CAA52597 variant
augcacggcaaggugcccacccugcaggacgucguucucgagcugacaccucaaacggaaaucgaucuucagugcaacgagcagcuggacagcuccgaagaugaggacgaagaugagguggaccaucuccaggagagaccgcaacaggcccggcaggcuaaacagcacaccuguuaccugauucaugugcccugcugugaaugcaaguucgucgugcaacuugauauccagucuacaaaagaggaccugcgcguugugcagcagcuccugaugggggcccugaccgucacauguccucucugcgcgagcuccaauuga

SEQ ID NO: 3160 - RNA, 297 nt, Artificial Sequence
  AAF13691 variant
augagaggcaacaaucccacccugcgggaguacauccucgaccugcacccugaaccgacagaucuuuucugcuaugagcagcugugugacagcuccgaugaagacgagauuggccucgaucgccccgacggacaagcccagccugcuacggccaacuacuauaucgugaccugcuguuacacaugcgauaccacagucagacuguguauuaauucuaccacaaccgacguucggacgcuucagcagcugcucauggggaccugcacaaucgugugucccagcugcgcgcaacaguga

SEQ ID NO: 3161 - RNA, 324 nt, Artificial Sequence
  ACL12335 variant
augcacggccccaaggccacccugugcgacaucgugcucgaucuggagccucagaacuacgaagaggucgaccuuguuuguuaugaacagcugccggauagcgacuccgagaaugaaaaagaugagcccgacggggugaaccauccucuccugcuugcuagacgggccgagccccagcgccacaauauugugugcgucuguugcaaguguaacaaucagcugcagcucgugguugaaacaucucaagauggacugagagcgcugcagcaacucuucauggacacgcugagcuuugugugcccucuuugugcugccaaccaguga

SEQ ID NO: 3162 - RNA, 318 nt, Artificial Sequence
  AAA79500 variant
augcacggcaaggugcccacccugcaggaggucauccucgaacuggccccucaaacagagauugaccuucagugcaacgaacagcuggauagcuccgaggacgaagaugaggacgagaucgaucaucuccuggaaagaccgcagcaagcucggcaggccgagcagcacaaauguuaccuuauucauguucccugcuguaagugcgaacugguggugcagcucgacauccaaucuacgaaagaggagcugcgcgucgugcagcagcugcucaugggggcgcugaccguuacauguccucuuugcgcuagcuccaaguga

SEQ ID NO: 3163 - RNA, 1392 nt, Artificial Sequence
  AAF80488 variant
augggcaaggagaaaacccacaucaacauuguggucaucgggcauguugacagcggaaaguccacaacgaccggccaccugauuuacaaaugcgggggaaucgauaagagaacaauugaaaaauucgagaaggaagccgcugagaugggcaaggggucuuuuaaauaugccugggugcucgacaagcugaaagcggaacgggagcgcggaaucaccaucgauauuagccuuuggaaguucgagacaaccaaauacuauaucacaauuaucgacgcucccggccauagagauuuuauuaagaauaugaucaccggcacgucccaggccgacugugccgugcugauugucgcugccggggugggagaguucgaagcuggcaucucuaagaacgggcaaacccgggaacacgcccuccuggcguacacacuuggaguuaaacagcugaucgugggcgucaauaagauggauagcaccgagccugccuauuccgagaaacgcuacgacgaaauugugaaggagguuucugcuuauaucaaaaagauuggguacaacccggccacagugcccuuugucccuaucagcggauggcauggcgauaauaugcucgaacccuccccuaacaugcccugguucaaaggcuggaagguggagagaaaggaagggaaugcuagcggagugucucugcuggaggcccucgacaccauucugccuccgacgcggcccacagauaaaccucuucgccugccccuccaggacgucuacaagaucggcgggaucggaaccguuccugugggcagaguggagacagggauucugcggcccggaauggucgugaccuuugcgccgguuaacaucaccacagaagugaaauccgucgagaugcaccacgaagcccuuagcgaggcucugccuggcgauaaugugggcuucaacguuaagaaugugucugucaaagacauucgcagagggaacgugugcggagacuccaagagcgaucccccucaggaagccgcucaauuuacgucucaggucaucauucucaaucaucccggccagaucuccgccggguauagccccgugaucgacugucacaccgcccauauugcuugcaaguucgcggagcugaaagagaagaucgaucggcgcuccggcaaaaagcuggaagacaacccuaaaucucucaagagcggagaugccgcuauuguugagauggugccggggaagcccaugugugucgaauccuuuagccaguacccuccccugggcagauucgccgugcgggacaugcgccaaacaguugccgugggagucaucaaaaauguggagaagaaaucuggcggggcuggaaaggugaccaaauccgcccagaaggcgcagaaggcuggcaaauga

SEQ ID NO: 3164 - RNA, 2919 nt, Artificial Sequence
  EAW51573 variant
auggacaccgaucuguacgacgaguucggcaacuauaucgggcccgaacucgauagcgacgaggaugacgaugaacugggaagagagacaaaggaccuugaugaaauggacgaugacgaugacgacgaugacgugggcgaucacgacgaugaccauccugggauggaggucguucugcacgaggauaaaaaguacuauccgacggccgaagagguguacggacccgaaguggagaccauuguccaggaggaagacacacaaccucucaccgagcccaucauuaaaccugugaagaccaaaaaguuuacccugauggaacagacacuucccguuaccguguaugagauggauuuccuggcugaccucauggauaauuccgaacugauccggaacgucacgcugugcggccaucuccaccaugggaagaccuguuuuguggacugccugauugagcagacacacccugagauccgcaaaagauacgaccaggaucuuuguuauaccgacauccuguucacagaacaagagcggggaguuggcauuaagucuaccccggugacggucgugcuccccgauacaaaaggcaagagcuaccuguuuaauaucauggacaccccugggcacgugaacuucuccgaugaagucacagccggacuucgcauuucugacggcguugugcuguuuaucgaugcggcugagggggugaugcucaauaccgaaagacugauuaaacaugccguccaggagcggcuggccgugaccguuugcaucaacaagauugaccgccucauccuggagcuuaagcugcccccuacagaugcuuacuauaaacucagacacaucguggacgaagucaauggacugauuagcauguacuccacggaugagaaccuuauccugucuccccuccugggcaauguguguuucagcuccagccaguauucuauuugcuuuacccugggguccuucgccaagaucuacgcugacacauuuggagauauuaacuaucaggaguucgccaaacggcucuggggcgacaucuacuuuaauccgaagacccgcaaauucacaaagaaagcgccuaccagcagcucccaaagaucuuucguugaauuuauccuggaaccccuuuauaagauucuggcccagguggucggcgacguggauacgucucucccucggacacuggacgagcuugggauccaucugaccaaggaggaacucaaacugaacauucgcccccugcucagacuggucuguaagaaauucuuuggagaguucaccggcuuuguggauaugugcguucagcacauccccuccccuaaggugggggcuaaaccgaagauugaacacacauacaccggaggcgucgacagcgaucuuggggaggccauguccgacugugaucccgacggaccucugaugugccauacaacgaagauguacucuaccgaugacggcgugcaguuccacgcuuuuggccggguucucagcgggacaauccaugccggacaacccgugaaaguccugggcgagaauuauacccuggaagaugaggaagacucccagaucuguacaguggggcgccuuuggauuagcguggcgagauaccacaucgagguuaaccgggucccugccggaaauugggugcucauugaaggcguggaucagcccaucgucaagaccgcuacgauuaccgagccgagagggaacgaggaagcccaaaucuuccgcccucugaaauuuaacacaaccucugugauuaagaucgcuguugagcccgugaauccuuccgaacugcccaaaaugcucgacggccugcggaaggucaacaagagcuauccuucucuuacaaccaaaguggaggaaagcggagagcauguuauccugggcacgggggagcucuaccuggacugcgugaugcacgaucugagaaagauguauuccgaaauugacaucaaagucgccgaucccgugguuacauucugcgagaccguggucgaaacaucuagccuuaaguguuuugccgagaccccgaauaaaaagaacaagauuaccaugaucgcugaaccucucgagaaaggacuggcggaggacauugaaaaugagguggugcagaucacauggaaccgcaagaaacugggcgaguucuuucagacgaaguacgauugggaccuccuggccgcucgguccaucugggccuucgggcccgaugccaccggacccaauauucuugucgacgauacacugccuagcgaaguugacaaagcucuccugggcucugugaaggauuccaucgugcagggguuccaauggggcaccagagagggaccgcugugcgacgaacuuauucgcaacgucaaauuuaagauccucgacgccgugguugcgcaggagccccugcaccggggcgggggacagauuaucccuacagcuagacgcguggucuauagcgccuuccugauggccacaccccggcucauggaaccuuacuacuuuguggagguucaggcucccgccgauugugugucugcugucuauacggugcuggccagacgccggggccauguuacacaagacgcgccuauccccggguccccgcuuuacaccauuaaggccuucaucccugcuauugauagcuuuggauucgaaaccgaccugagaacacacacccagggccaggccuuuucccucucuguguuccaucacuggcagaucguccccggggauccucuggacaaaagcauugugauccggccccuggagccgcaaccugcuccccaccuugcccgcgaguuuaugaucaagacaagacggagaaaaggccucuccgaagaugugucuauuagcaaguucuuugacgauccuaugcugcuggagcucgcgaaacaggacgucguucugaauuaucccauguga

SEQ ID NO: 3165 - RNA, 1971 nt, Artificial Sequence
  EAW50963 variant
augagacccagcggcaccgccggggcugcccugcucgcgcugcuugcugcccugugcccugccucccgggcucucgaggaaaagaaagugugucagggaacaucuaacaagcugacgcaacuuggcaccuucgaggaccacuuucugagccuccagcgcauguucaauaacugcgaagucguucuggggaaucuggagaucacauacgugcagagaaacuaugaucucuccuuucugaaaaccauucaggaaguggccggauacguccuuaucgcucugaauacaguggagcggauuccgcucgagaaccugcaaaucauucgcggcaauauguauuacgaaaacucuuaugcccuugcgguucugagcaauuacgacgccaacaagaccgggcucaaagagcugcccaugagaaaucugcaggaaauccuccauggagcugugcgguucuccaacaauccugcccuguguaacgucgagucuauccaguggcgcgauauugugagcuccgacuuucuuagcaauaugucuauggauuuccagaaccaccugggcuccugccaaaagugugaccccagcugcccuaacggcucuuguuggggagcuggggaggaaaauugccagaagcucacaaaaaucauuugugcccagcagugcuccggcagaugucggggaaagagccccucugauugcugccauaaccaaugugcggccgggugcaccggcccucgcgaguccgacugucugguuugcagaaaauuucgggaugaagcuacguguaaggauaccugcccgccccuuaugcuguauaauccuacaaccuaccagauggacgugaaccccgaggggaaauacagcuucggagccacaugugucaagaagugcccucgcaauuauguggugaccgaccacggcuccugugucagagcuugcggcgccgauucuuacgaaauggaggaggacgggguucggaaauguaagaaaugcgaaggacccugccgcaagguguguaacggcaucgggauuggagaguuuaaagacagccucuccaucaaugccacgaacauuaagcauuucaaaaauugcacaagcaucucuggcgaucugcacauccugccgguggcuuuuagaggggacuccuucacccacacaccuccccucgauccucaggaacuggacauucuuaagaccgucaaggagaucaccggauuucugcucauucaagcguggcccgaaaaccggacagaucugcaugccuucgagaaucuugagaucauuagaggccgcacgaaacagcacggccaguucagccuggcugugguuucucucaacaucaccagccuggggcugcggucccucaaggaaaucucugacggagaugugauuaucagcggcaauaaaaaccuguguuaugccaauacaauuaacuggaagaaacuuuuugggaccuccggacagaagacaaagaucauuagcaacagaggcgaaaauucuugcaaagccaccgggcaagucugucaugcucugugcucccccgaaggcuguuggggaccugagccgcgcgacugcgugagcugucggaacguuucuagaggccgcgaaugcguggauaaguguaaucuccuggagggggagccccgggaguucgucgagaacuccgaaugcauccagugccacccugagugucugccccaggccaugaauaucacgugcacaggaagaggcccugacaacuguauucagugcgcgcacuacaucgaugggccccauugugugaaaaccugcccggcuggagucaugggcgagaauaacacccuuguguggaaguaugccgacgccgggcacguuugucaucucugccacccuaauuguacauacggcugcaccggacccggccuggaaggguguccuacaaacggaagcuauauugugucccauuuuccccgcucuuucuacaaaaugagcguccac

SEQ ID NO: 3166 - RNA, 3411 nt, Artificial Sequence
  ADL28125 variant
augagacccagcggcaccgccggggcugcccugcucgcgcugcuugcugcccugugcccugccucccgggcucucgaggaaaagaaagugugucagggaacaucuaacaagcugacgcaacuuggcaccuucgaggaccacuuucugagccuccagcgcauguucaauaacugcgaagucguucuggggaaucuggagaucacauacgugcagagaaacuaugaucucuccuuucugaaaaccauucaggaaguggccggauacguccuuaucgcucugaauacaguggagcggauuccgcucgagaaccugcaaaucauucgcggcaauauguauuacgaaaacucuuaugcccuugcgguucugagcaauuacgacgccaacaagaccgggcucaaagagcugcccaugagaaaucugcaggaaauccuccauggagcugugcgguucuccaacaauccugcccuguguaacgucgagucuauccaguggcgcgauauugugagcuccgacuuucuuagcaauaugucuauggauuuccagaaccaccugggcuccugccaaaagugugaccccagcugcccuaacggcucuuguuggggagcuggggaggaaaauugccagaagcucacaaaaaucauuugugcccagcagugcuccggcagaugucggggaaagagccccucugauugcugccauaaccaaugugcggccgggugcaccggcccucgcgaguccgacugucugguuugcagaaaauuucgggaugaagcuacguguaaggauaccugcccgccccuuaugcuguauaauccuacaaccuaccagauggacgugaaccccgaggggaaauacagcuucggagccacaugugucaagaagugcccucgcaauuauguggugaccgaccacggcuccugugucagagcuugcggcgccgauucuuacgaaauggaggaggacgggguucggaaauguaagaaaugcgaaggacccugccgcaagguguguaacggcaucgggauuggagaguuuaaagacagccucuccaucaaugccacgaacauuaagcauuucaaaaauugcacaagcaucucuggcgaucugcacauccugccgguggcuuuuagaggggacuccuucacccacacaccuccccucgauccucaggaacuggacauucuuaagaccgucaaggagaucaccggauuucugcucauucaagcguggcccgaaaaccggacagaucugcaugccuucgagaaucuugagaucauuagaggccgcacgaaacagcacggccaguucagccuggcugugguuucucucaacaucaccagccuggggcugcggucccucaaggaaaucucugacggagaugugauuaucagcggcaauaaaaaccuguguuaugccaauacaauuaacuggaagaaacuuuuugggaccuccggacagaagacaaagaucauuagcaacagaggcgaaaauucuugcaaagccaccgggcaagucugucaugcucugugcucccccgaaggcuguuggggaccugagccgcgcgacugcgugagcugucggaacguuucuagaggccgcgaaugcguggauaaguguaaucuccuggagggggagccccgggaguucgucgagaacuccgaaugcauccagugccacccugagugucugccccaggccaugaauaucacgugcacaggaagaggcccugacaacuguauucagugcgcgcacuacaucgaugggccccauugugugaaaaccugcccggcuggagucaugggcgagaauaacacccuuguguggaaguaugccgacgccgggcacguuugucaucucugccacccuaauuguacauacggcugcaccggacccggccuggaaggguguccuacaaacggacccaaaauuccuagcaucgcuacgggcauggugggggcccugcuccugcuucuggucguggcucucggaauuggccuguuuaugcgccggagacauaucguucgcaagcggacccugagacggcuucuccaagagcgcgaacugguggagccccugacaccguccggggaagccccuaaucaggcgcuccugcggauucuuaaggagaccgaguucaaaaagaucaaaguccugggcucuggagccuuuggcacaguguauaaggggcucuggauccccgaaggagagaaagugaagauucccguugcuaucaaggaacugagagaggccaccagcccuaaagcuaacaaggaaauucuggacgaggccuacgucauggcguccguggauaauccgcacgugugcagacuucucggcaucugccugacgucuaccguccagcugauuacacagcucaugcccuucgggugucugcuugacuacgugcgcgagcacaaagauaacaucggaagccaauaucugcucaauuggugcguucagaucgccaagggcaugaacuaccuggaagaccggagacuggugcaucgcgaucuugcugccagaaacguccucgugaaaaccccucagcacguuaagauuacagacuuugggcuggcuaaacugcucggcgccgaggaaaaggaguaucaugccgaaggaggcaaggugcccaucaaauggauggcucuggaguccauucuucaccggaucuacacccaccagagcgaugucuggucuuauggggugacgguuugggagcugaugacauucggauccaagccuuacgacggcauucccgcgagcgaaaucucuuccauccucgagaaaggggaacgccugccucaacccccgauuuguaccaucgauguguauaugauuauggucaagugcuggaugaucgacgccgauagcagaccuaaauuucgggagcugauuaucgaguucucuaagauggcucgcgacccccagagauaccuugugauccagggagaugaacggaugcaucugccuagccccacagacuccaauuuuuaccgcgcccucauggacgaggaagauauggacgauguggucgacgccgaugaguaucugauuccgcaacagggcuucuuuagcucuccuuccaccagcagaacaccccuccuguccucucuuagcgcuaccuccaacaauucuacgguugccuguaucgaccggaacggccugcagagcugcccuauuaaggaagauuccuuccuccagcgcuacucuagcgaccccaccggggcgcugacagaggauuccaucgacgauaccuuccugcccgugccuggagaguggcuuguguggaaacaaagcuguucuuccacaagcucuacccacuccgcugccgccagccugcagugcccgucucagguccugcccccugcuucccccgaaggcgagacgguggccgaccuccagacacaauga

SEQ ID NO: 3167 - RNA, 150 nt, Artificial Sequence
  CCO13722 variant
augugcgccaccugugcuauccagacagcccccacgggcccuaacaagagcucccugucugacuucagccucccgcugaaacuucacuuucuguccaccauuucuaucagccccuucgcguccaauaaggugcucacacuguuuauuuga

SEQ ID NO: 3168 - RNA, 1218 nt, Artificial Sequence
  CCDS47587.1 variant
augagacccagcggcaccgccggggcugcccugcucgcgcugcuugcugcccugugcccugccucccgggcucucgaggaaaagaaagugugucagggaacaucuaacaagcugacgcaacuuggcaccuucgaggaccacuuucugagccuccagcgcauguucaauaacugcgaagucguucuggggaaucuggagaucacauacgugcagagaaacuaugaucucuccuuucugaaaaccauucaggaaguggccggauacguccuuaucgcucugaauacaguggagcggauuccgcucgagaaccugcaaaucauucgcggcaauauguauuacgaaaacucuuaugcccuugcgguucugagcaauuacgacgccaacaagaccgggcucaaagagcugcccaugagaaaucugcaggaaauccuccauggagcugugcgguucuccaacaauccugcccuguguaacgucgagucuauccaguggcgcgauauugugagcuccgacuuucuuagcaauaugucuauggauuuccagaaccaccugggcuccugccaaaagugugaccccagcugcccuaacggcucuuguuggggagcuggggaggaaaauugccagaagcucacaaaaaucauuugugcccagcagugcuccggcagaugucggggaaagagccccucugauugcugccauaaccaaugugcggccgggugcaccggcccucgcgaguccgacugucugguuugcagaaaauuucgggaugaagcuacguguaaggauaccugcccgccccuuaugcuguauaauccuacaaccuaccagauggacgugaaccccgaggggaaauacagcuucggagccacaugugucaagaagugcccucgcaauuauguggugaccgaccacggcuccugugucagagcuugcggcgccgauucuuacgaaauggaggaggacgggguucggaaauguaagaaaugcgaaggacccugccgcaagguguguaacggcaucgggauuggagaguuuaaagacagccucuccaucaaugccacgaacauuaagcauuucaaaaauugcacaagcaucucuggcgaucugcacauccugccgguggcuuuuagaggggacuccuucacccacacaccuccccucgauccucaggaacuggacauucuuaagaccgucaaggagaucaccggacugagcuga

SEQ ID NO: 3169 - RNA, 3633 nt, Artificial Sequence
  AAG35789 variant
augagacccagcggcaccgccggggcugcccugcucgcgcugcuugcugcccugugcccugccucccgggcucucgaggaaaagaaagugugucagggaacaucuaacaagcugacgcaacuuggcaccuucgaggaccacuuucugagccuccagcgcauguucaauaacugcgaagucguucuggggaaucuggagaucacauacgugcagagaaacuaugaucucuccuuucugaaaaccauucaggaaguggccggauacguccuuaucgcucugaauacaguggagcggauuccgcucgagaaccugcaaaucauucgcggcaauauguauuacgaaaacucuuaugcccuugcgguucugagcaauuacgacgccaacaagaccgggcucaaagagcugcccaugagaaaucugcaggaaauccuccauggagcugugcgguucuccaacaauccugcccuguguaacgucgagucuauccaguggcgcgauauugugagcuccgacuuucuuagcaauaugucuauggauuuccagaaccaccugggcuccugccaaaagugugaccccagcugcccuaacggcucuuguuggggagcuggggaggaaaauugccagaagcucacaaaaaucauuugugcccagcagugcuccggcagaugucggggaaagagccccucugauugcugccauaaccaaugugcggccgggugcaccggcccucgcgaguccgacugucugguuugcagaaaauuucgggaugaagcuacguguaaggauaccugcccgccccuuaugcuguauaauccuacaaccuaccagauggacgugaaccccgaggggaaauacagcuucggagccacaugugucaagaagugcccucgcaauuauguggugaccgaccacggcuccugugucagagcuugcggcgccgauucuuacgaaauggaggaggacgggguucggaaauguaagaaaugcgaaggacccugccgcaagguguguaacggcaucgggauuggagaguuuaaagacagccucuccaucaaugccacgaacauuaagcauuucaaaaauugcacaagcaucucuggcgaucugcacauccugccgguggcuuuuagaggggacuccuucacccacacaccuccccucgauccucaggaacuggacauucuuaagaccgucaaggagaucaccggauuucugcucauucaagcguggcccgaaaaccggacagaucugcaugccuucgagaaucuugagaucauuagaggccgcacgaaacagcacggccaguucagccuggcugugguuucucucaacaucaccagccuggggcugcggucccucaaggaaaucucugacggagaugugauuaucagcggcaauaaaaaccuguguuaugccaauacaauuaacuggaagaaacuuuuugggaccuccggacagaagacaaagaucauuagcaacagaggcgaaaauucuugcaaagccaccgggcaagucugucaugcucugugcucccccgaaggcuguuggggaccugagccgcgcgacugcgugagcugucggaacguuucuagaggccgcgaaugcguggauaaguguaaucuccuggagggggagccccgggaguucgucgagaacuccgaaugcauccagugccacccugagugucugccccaggccaugaauaucacgugcacaggaagaggcccugacaacuguauucagugcgcgcacuacaucgaugggccccauugugugaaaaccugcccggcuggagucaugggcgagaauaacacccuuguguggaaguaugccgacgccgggcacguuugucaucucugccacccuaauuguacauacggcugcaccggacccggccuggaaggguguccuacaaacggacccaaaauuccuagcaucgcuacgggcauggugggggcccugcuccugcuucuggucguggcucucggaauuggccuguuuaugcgccggagacauaucguucgcaagcggacccugagacggcuucuccaagagcgcgaacugguggagccccugacaccguccggggaagccccuaaucaggcgcuccugcggauucuuaaggagaccgaguucaaaaagaucaaaguccugggcucuggagccuuuggcacaguguauaaggggcucuggauccccgaaggagagaaagugaagauucccguugcuaucaaggaacugagagaggccaccagcccuaaagcuaacaaggaaauucuggacgaggccuacgucauggcguccguggauaauccgcacgugugcagacuucucggcaucugccugacgucuaccguccagcugauuacacagcucaugcccuucgggugucugcuugacuacgugcgcgagcacaaagauaacaucggaagccaauaucugcucaauuggugcguucagaucgccaagggcaugaacuaccuggaagaccggagacuggugcaucgcgaucuugcugccagaaacguccucgugaaaaccccucagcacguuaagauuacagacuuugggcuggcuaaacugcucggcgccgaggaaaaggaguaucaugccgaaggaggcaaggugcccaucaaauggauggcucuggaguccauucuucaccggaucuacacccaccagagcgaugucuggucuuauggggugacgguuugggagcugaugacauucggauccaagccuuacgacggcauucccgcgagcgaaaucucuuccauccucgagaaaggggaacgccugccucaacccccgauuuguaccaucgauguguauaugauuauggucaagugcuggaugaucgacgccgauagcagaccuaaauuucgggagcugauuaucgaguucucuaagauggcucgcgacccccagagauaccuugugauccagggagaugaacggaugcaucugccuagccccacagacuccaauuuuuaccgcgcccucauggacgaggaagauauggacgauguggucgacgccgaugaguaucugauuccgcaacagggcuucuuuagcucuccuuccaccagcagaacaccccuccuguccucucuuagcgcuaccuccaacaauucuacgguugccuguaucgaccggaacggccugcagagcugcccuauuaaggaagauuccuuccuccagcgcuacucuagcgaccccaccggggcgcugacagaggauuccaucgacgauaccuuccugcccgugccugaguauauuaaucaaagcgugccgaaaagacccgcuggaucuguccagaacccuguguaccacaaucagccccuuaacccugcccccucccgggacccucauuaucaggauccgcacagcacagccguuggcaaucccgaauaccugaacaccgugcaaccuacgugugucaauucuacauuugacucccccgcucauugggcccagaaggggagccaccagaucucucucgacaacccugauuaucagcaagacuucuuucccaaagaggcgaagccgaauggaauuuucaaaggcuccaccgcugaaaacgccgaguaccugagaguggccccucagagcuccgaauuuaucggggcuuga

SEQ ID NO: 3170 - RNA, 1395 nt, Artificial Sequence
  AAI18666 variant
auggccgcugaggacgugaucauuugcgcccagcaauguagcggcagaugccgggggaagucccccucugauuguugccacaaccagugugcggcuggaugcaccggcccucgcgaaagcgacugucuggucugcagaaaauuccgggaugaggccacauguaaggacacgugcccgccccucaugcuguacaauccuaccacauaucagauggauguuaaccccgaagggaaauacuccuuuggagccaccugugugaagaaaugcccucgcaauuauguggucacagaccauggcucuugcgugagagcuuguggggccgauagcuacgagauggaagaggacggaguucggaagugcaagaaaugugagggccccugccgcaagguguguaacggcaucgggauuggagaguucaaagauucccuuucuaucaaugcuaccaacauuaagcacuuuaaaaauugcacaagcaucuccggcgaccugcauauccucccugucgccuucagaggggauagcuuuacccacacgccgccccuggacccucaggaacuugauauucugaagaccgugaaggaaaucacaggauuccuccugauucaagcguggcccgagaaccggaccgaccugcaugccuuugagaaucucgaaaucauucgcggcagaacaaaacagcacgggcaguucucucuggcuguugugucccuuaacaucaccagccugggacuccggucucugaaggagauuuccgacggcgaugucaucaucagcggcaauaaaaaccuuuguuaugccaauacgauuaacuggaagaaacuguuugggacaucuggacagaagaccaaaaucauuuccaaucgcggcgaaaacagcugcaaggcuacagggcaagugugucacgcccucugcuccccugagggauguuggggccccgaaccgagagacugcgugucuugccggaacgucagccgcgggagagaguguguugauaagugcaaucugcuggagggagaaccucgggaguucguggaaaacuccgaguguauccagugccaucccgaaugucucccucaggcgaugaauauuaccugcaccggcagaggccccgacaacuguauccagugcgcccacuacaucgaugggccccauugugugaaaacaugcccugcuggagucaugggcgagaauaacacgcugguguggaaguaugccgacgcugggcacguuugucaccuuugccauccgaauugcaccuacggauguacaggccccgggcuggagggcugcccuaccaacggacccaaaauuccuagcaucgccacaggcauggugggggcccuccugcuucugcucgucguggcucugggaauuggcccccugcacgggcgcuga

SEQ ID NO: 3171 - RNA, 3276 nt, Artificial Sequence
  AAH94761 variant
augagacccagcggcaccgccggggcugcccugcucgcgcugcuugcugcccugugcccugccucccgggcucucgaggaaaagaaagugugucagggaacaucuaacaagcugacgcaacuuggcaccuucgaggaccacuuucugagccuccagcgcauguucaauaacugcgaagucguucuggggaaucuggagaucacauacgugcagagaaacuaugaucucuccuuucugaaaaccauucaggaaguggccggauacguccuuaucgcucugaauacaguggagcggauuccgcucgagaaccugcaaaucauucgcggcaauauguauuacgaaaacucuuaugcccuugcgguucugagcaauuacgacgccaacaagaccgggcucaaagagcugcccaugagaaaucugcagggacagaagugugauccuuccugccccaacggcucuuguuggggcgcuggggaagagaauugccagaagcucacaaaaaucaucugugcccaacagugcagcggacggugucgcggcaaguccccuagcgacugcugucauaaccagugcgcugccgggugcaccggacccagagagucugauugucuggugugccggaaauuccgcgacgaagcgacguguaaggauaccugcccuccgcuuaugcuguauaaucccacaaccuaccagauggacgucaacccugagggcaaauacuccuuuggggccacaugugugaagaagugccccagaaacuauguugugaccgaucacggaagcuguguccgggcuugcggcgccgacucuuacgaaauggaggaagauggcgugcgcaaauguaagaaaugcgaggggccuuguagaaaggugugcaauggaauuggcaucggggaguucaaagacucccucagcauuaacgcuacgaauaucaagcauuuuaaaaacugcacaucuauuuccggagaucugcacauccuucccgucgccuuccggggcgacagcuuuacccauacaccgccucuggacccccaagaacucgauauucugaagaccguuaaggagaucaccggguuccugcucauccaggccuggccugaaaaucgcacagaccugcacgcuuuugagaaccuugaaauuaucagaggacggacgaaacagcacggccaauucucccuggcgguggugucucucaauauuaccagccugggccuuagaucccugaaggagaucagcgauggggacgucauuaucucuggaaacaaaaaucucuguuaugccaacacaaucaauuggaagaaacuguuuggcaccuccgggcagaagacaaagauuaucagcaaccgcggagaaaauucuugcaaagcuaccggccaggugugucaugcccugugcagccccgagggguguuggggccccgagccucgggauugcguuuccuguagaaacgugucucgcggacgggaaugcgucgacaaguguaaucuccuggagggcgaaccgagagaguucguggagaacagcgaaugcauucagugucaccccgagugccuuccucaagccaugaacaucacgugcacagggcgcggacccgauaauuguauucagugcgcucauuacaucgacggcccucacuguguuaaaaccugccccgccggggugaugggagaaaacaauacccuggucuggaaguaugcggaugcuggccacgugugucaucucugccacccgaacuguacauacgggugcaccggcccuggacuggagggcugucccacaaaugggccuaaaauccccuccauugccacgggaauggucggcgcccugcuucuccugcuggugguugcucucgggaucggacuguucaugcggagacgccauauugugcggaagagaacccuucgccggcugcuccaggagagagaacuggucgagccucugacacccagcggcgaagccccgaaccaggcccuucuccggauccugaaggagaccgaauuuaaaaagauuaaagugcuggggucuggcgcuuucggaacaguuuauaagggccucuggaucccugagggggagaaagugaagauucccgucgcgaucaaggaacugcgcgaggccaccucccccaaagcuaauaaggaaauccuugacgaggccuacgugauggcuagcguggauaacccucacguuugcagacugcucggaauuugucugacgucuaccguccaacugaucacacagcuuaugccguuuggcugccuccuggacuacgugcgggaacauaaagacaauauugggucccaguaucugcucaacuggugcgugcagaucgccaagggaaugaauuaccuggaggauagacgccuuguccaccgggaccuggcggccagaaacgugcucguuaaaacaccccaacacgugaagauuaccgauuucggccuggcuaaacugcuuggggccgaggaaaaggaguaucaugcugaaggcggaaaggucccuaucaaauggauggcccucgagagcauccugcaccgcauuuacacccaucaguccgacguguggucuuauggcguuacggugugggaacugaugacauuugggagcaagcccuacgauggaaucccugccuccgagauuucuagcauccucgagaaaggcgaaagacugccccagccucccauuuguaccaucgacgucuauaugaucauggugaagugcuggaugauugaugcugacucccggccgaaauuccgcgagcuuaucauugaauuuagcaagauggcgagagauccucagcgguaccugguuauccaaggggacgagcgcaugcaccuccccucuccuacagauuccaauuucuacagagcccugauggacgaggaagauauggacgacguggucgaugcugacgaguaucugauuccccagcagggauuuuucagcucuccguccaccagccggaccccucuucugucuagccucuccgccacaagcaacaauucuacgguggccuguaucgaucgcaacggccugcaauccugccccaucaaggaagacagcuuucuccagagauacuccucugauccuaccggcgcucugacagaggacagcauugaugacaccuuccuucccgugcccggggaauggcuggucuggaaacaguccuguucuagcacauccucuacccacagcgccgcggcuucccuccagugcccuagccaaguucugccgcccgccucuccugagggagagacgguggccgaucugcagacacaguga

SEQ ID NO: 3172 - RNA, 216 nt, Artificial Sequence
  CAA34902 variant
augagacccagcggcaccgccggggcugcccugcucgcgcugcuugcugcccugugcccugccucccgggcucucgaggaaaagaaaggaaagggcgugucucgcagacugccgcggcgccccagaaucgccccucggacaccccagccugcucaaccccgcacgggggccccugcgagagcccgggcuccggcccgccccuuccuuuuuccuuga

SEQ ID NO: 3173 - RNA, 720 nt, Artificial Sequence
  AAH10992 variant
augccccugggccacaucaugagacucgaccuggagaagauugcccuugaauacaucgugccuugccugcaugaggucggguucuguuaucucgauaacuuucugggagaaguugugggcgacugcgugcuugagcgggucaaacagcugcacuguaccggggcucuccgcgauggacaacuggccggcccgagagcgggggugagcaagcggcaucugcgcggagaccagauuacauggaucggcggcaaugaagaggggugcgaggcuauuuccuuccuccugucucuuaucgauagacugguucucuacuguggaagccggcugggcaaauauuacgugaaggaacgcuccaaagccauggucgccugcuaucccgggaacggaacgggcuacgugagacacguugacaauccuaacggggauggacgguguauuaccugcaucuauuaccuuaauaagaacugggacgcuaagcugcauggcggcauccuccgcauuuuucccgaggggaaaucuuucaucgccgauguggaaccuauuuuugacagacugcuguucuuuuggagcgaucggcgcaauccccacgagguccagccuuccuacgcuacaagauaugccaugaccgugugguacuucgacgcggaggaacgggccgaggcuaagaaaaaguuucgcaaccucacaagaaaaaccgaaucugcccugacagaggauuga

SEQ ID NO: 3174 - RNA, 1566 nt, Artificial Sequence
  BAH13456 variant
auggccaccagccugcacgagggccccacaaaccagcucgaccugcuuaucagagcuguggaagccuccguccauucuagcaaugcgcacugcacggauaagaccauugaggcugccgaagcccugcuccauauggaguccccuacaugucugcgggacucucgcagcccggaguucauccacgcugccaugagacccgauguuauuaccgaaacagugguggaggucuccaccgaagagucugaaccuauggacacaagccccaucccuaccucccccgauagccaugagccuaugaaaaagaaaaagguggggcggaaaccgaagacgcaacagucucccauuuccaacggaagcccugagcuuggcaucaagaaaaagccccgcgaagggaaaggaaauaccacauaccugugggaguuucuccuggaccugcuccaggauaagaauaccugcccuagauauaucaaauggacacagcgggaaaagggcauuuucaagcugguugacucuaaagcuguguccaaacuuugggggaaacacaagaacaaacccgauaugaacuacgagaccaugggacgcgcccugagauauuacuaucaacggggcauccucgcgaaggucgaaggccagcgccugguguaccaguuuaaagacaugccgaagaauauuguugugaucgaugacgauaagagcgagacguguaacgaggaccuugccgggacaaccgacgaaaaaucucuggagagagucucccucagcgcugaaucccugcugaaggccgcuucuagcgugcgguccggaaagaauagcucuccuauuaacugcucccgcgccgagaagggcguggcgagagucguuaauaucacaagccccgggcacgaugccucuagccgguccccuaccaccacagcuucugugagcgccacggcugcuccccgcaccgugagagucgccaugcaagugcccguugugaugacaucccucggacagaaaauuagcaccgucgccgugcagucuguuaacgcgggcgccccucugaucacauccaccagcccgacgacagcuaccucucccaagguggucauccagaccauuccuacagugaugcccgccuccaccgaaaauggggacaagaucacaaugcagccugccaaaauuaucacgauucccgcuacccaacuugcccagugucagcugcaaacaaagagcaaccucaccggauccggcucuaucaauaucgucggcacaccgcuggcggugcgggcucuuaccccuguuagcauugcccaugggacgcccgugaugagacuguccaugccuacccagcaggccucuggacagacacccccucgcgucaucagcgcugugauuaaaggccccgagguuaaguccgaggccguggcuaaaaagcaagaacacgaugucaagacccuccagcugguggaggaaaaaccggccgacgggaacaagacagugacccauguugucguggugagcgcgccuucugccaucgcucugcccgucacgaugaaaacagagggacucgugaccugcgaaaaguga

SEQ ID NO: 3175 - RNA, 810 nt, Artificial Sequence
  BAC67168 variant
auggccgccgcccuguucgugcuccugggauuugcgcuucuggggacccacggagcuagcggcgccgccgggacagucuucacgaccguugaggaccucggauccaagauccugcuuacaugcucucugaacgauagcgcuaccgaagugacaggccaucgguggcucaaagggggagugguccugaaggaggacgcccugcccggccagaaaaccgaauuuaagguggauuccgacgaucaauggggcgaguacucuuguguuuuccucccugaaccgauggggacagcuaauauucagcugcacggacccccucgggugaaagccgucaagagcuccgagcauaucaacgagggcgaaaccgcgaugcuugugugcaagucugagagcguucccccugugacggacugggccugguauaaaauuaccgauuccgaagacaaggcucugaugaaugggagcgagucucgcuuuuucgucuccagcucucagggaagauccgagcuccacaucgaaaaccugaauauggaggccgaucccggccaguaccgguguaacgggacaagcucuaaaggauccgaccaagcuauuaucacccuucgcgugagaagccaucuggccgcgcucuggccuuuucugggcaucguggccgaaguccugguucucgugacaauuaucuucauuuaugagaagcggcgcaaaccggaagaugugcuggacgaugacgacgcuggcuccgcuccccuuaagucuagcgggcagcaccagaaugauaagggcaaaaacgucagacagagaaauuccagcuga

SEQ ID NO: 3176 - RNA, 945 nt, Artificial Sequence
  AAA35723 variant
auggcucccccucaggugcuggccuucggccuccugcuugccgcggcuaccgccacauuugccgcugcccaagaggaaugcgucugugagaacuacaagcuggcuguuaauugcuucgugaacaauaacagacagugucagugcacgagcgugggggcccagaauaccgucaucuguuccaaacucgcggccaagugccuggugaugaaagcugaaaugaacggaucuaaacuuggccggcgcgccaagccggagggggcucugcaaaauaacgacggacucuaugaucccgacugugaugaaagcggccuguuuaaggccaagcagugcaaugggacauccauguguuggugcguuaacaccgcgggagugagacggacagacaaagauaccgagauuacauguucugagcgcgucagaaccuacuggaucauuaucgaacugaagcacaaagcccgggagaagccuuaugacagcaaaucccuccgcacggcucugcagaaggaaauuaccacaagauaccagcuugaucccaaguucaucaccucuauccuguaugagaauaacgugauuacaaucgaccucguucaaaauagcucccagaaaacccagaacgauguggacauugccgaugucgcuuacuauuuugagaaggacgugaaaggcgaaagccuguuccauucuaagaaaauggaucuuacggugaauggcgagcagcuggaccucgacccugggcaaacacugaucuacuacgucgaugaaaaggcccccgaguuuuccaugcagggacugaaagccggcguuauugcugugaucguggucgugguuauugcgguggucgccgggaucgugguucucgugaucagccggaagaagcgcauggcuaaauaugaaaaggccgagauuaaagagaugggagaaaugcacagagagcugaacgccuga

SEQ ID NO: 3177 - RNA, 2931 nt, Artificial Sequence
  CCDS169.1 variant
auggagcugcaggccgcuagagccugcuucgcgcuccuguggggcugugcucuugccgccgcugccgcugcccaagggaaggaagugguccugcucgacuuugcggccgcuggaggcgagcugggguggcuuacccaccccuacggaaaaggcugggaucugaugcagaacaucaugaaugacaugccuauuuauauguacagcguuugcaacgugauguccggggaucaggacaauuggcuccggacaaacuggguguaucgcggagaagccgagagaaucuucauugaacugaaguuuacgguccgggauuguaauucuuucccgggcggcgcuagcuccugcaaagagaccuuuaaccuguacuaugccgagucugaccucgauuacgggacaaauuuccagaagcgccuguuuaccaaaaucgacacaauugcgcccgaugaaaucaccgugagcuccgacuucgaggccagacauguuaaacuuaacguggaagagagaucugucggaccucugacacgcaagggcuuuuaucucgcuuuccaagauaucggggccuguguggcucugcuuagcguuagaguguacuacaaaaagugccccgagcugcuccagggacuggcccacuuuccugaaaccauugccggcuccgacgcucccagccuggcgacggucgccgggaccuguguggaucaugcuguggucccuccgggaggcgaggaaccccggaugcacugcgccguugacggcgaguggcucgugccuaucgggcagugucugugccaggccggauaugaaaaaguggaggacgcuugucaagccugcucucccggcuucuuuaaguucgaggcguccgaaagcccuugccuugagugucccgaacauacacugccgucuccugagggggcuaccuccugcgaaugugaggagggauucuuucgcgcuccccaggauccugccagcaugcccugcacaagacccccuucugccccgcacuaccucaccgccgucggcaugggggcuaaaguggaacugcgguggacgcccccucaggacuccggaggccgcgaggauauuguuuauagcgugacaugugaacagugcuggcccgaguccggcgaaugugggccuugcgaggccucugucagauacagcgagcccccgcacggacuuacccggacauccgugaccguuagcgaccuggaaccucauaugaauuauaccuucacaguggaggcgcgcaacggcgucucugggcucgugacgucccggagcuuucggaccgccucugucagcaucaaucaaacagaacccccuaaggugagacuggagggacgcuccaccacaucucugagcguuuccuggagcauucccccuccccagcagucucggguguggaaguacgaggucaccuauagaaagaagggcgauuccaacagcuacaaugugcgccggacggaaggguucucuguuacacucgacgaucuggcuccggacaccaccuaccuugugcaaguccaggcccugacacaggagggccagggagcuggcuccaaagugcacgaauuucaaacccucagcccugagggguccggaaaccuggccgugaucggcgggguugcggucggaguggugcuucugcucguccuggccggcgugggguucuuuauucauagacgccggaagaaucagagagcucgccagucucccgaagauguuuauuucagcaaauccgagcagcugaagccccucaaaacauacguggacccucacacguaugaggauccgaaccaagccguccugaaguuuaccacagaaauccaccccucuugugugacccggcagaagguuaucggcgcuggagaguucggcgaaguguacaaagggaugcuuaagacaagcuccggcaaaaaggaggucccuguggccauuaaaacccugaaggccggauauacggaaaagcagagaguugacuuucucggggaggcuggaaucaugggccaguucagccaucacaacauuauccgccuggagggggugauuucuaaauacaagcccaugaugaucaucaccgaauauauggagaauggcgcgcuggacaaauuucuucgggaaaaggauggagaguucuccguccuccaacuggugggcaugcugagagggauugccgcuggaaugaaauaccucgccaacaugaauuacgugcaucgggaccuggccgcucgcaacauccuugucaauagcaaccugguuugcaaggugucugauuucggccucuccagagugcuggaagacgauccugaggccacauauaccacaagcgggggaaagauucccauccgguggaccgcgccugaggcuauuucuuacagaaaauuuacgagcgccuccgacgucuggagcuucggcaucgugaugugggaaguuaugacauauggggagcgccccuacugggaacugucuaaucacgaggugaugaaggccaucaacgauggcuuucggcuuccgaccccuauggacugucccuccgcuauuuaucagcucaugaugcagugcuggcagcaagagagagcccgcagaccuaaauucgcggauaucgucagcauucuggacaagcugauccgggcucccgauucccucaaaacacuggccgacuuugauccgcgcgugucuauuagacuuccuagcaccuccggaucugaaggcguucccuuccggaccgugagcgaguggcuggaauccaucaagaugcagcaguacacagagcauuuuauggccgcuggguauacggccauugaaaaggucgugcaaaugaccaaugacgacaucaaacgcaucggaguuagacucccuggccaccagaagcggauugcuuacucucugcuggggcuuaaagaucaggugaacacagucggaauccccauuuga

SEQ ID NO: 3178 - RNA, 2952 nt, Artificial Sequence
  AAG43576 variant
auggacugccagcugagcauccuccugcuucuguccuguucugugcucgauagcuucggcgagcugauuccccaaccuuccaacgaagucaaucuucuggacucuaagaccauccagggggagcucggauggauuagcuacccgucccacggcugggaagagaucucugggguugaugaacauuauacacccauuagaacguaccaggugugcaacgugauggaccacagccagaauaacuggcugcggaccaauugggucccucgcaacuccgcccaaaagaucuauguggagcugaaguuuacacucagagauuguaauagcaucccccugguucuuggaaccugcaaagagacauucaaccuguacuauauggaaucugacgaugaccauggcgugaaguuucgggagcaccaguucaccaaaauugauacaaucgcugccgacgaauccuuuacccagauggaucucggggaccgcauucugaaacuuaauacggagaucagagaggucggaccugugaacaagaaaggcuucuaccuggcguuucaggauguuggcgcuuguguggcccucgucagcgugcggguguauuucaagaaaugccccuuuaccgucaagaaucuggccauguucccugacacaguuccgauggacucucaaucccugguggaagugcgcgggagcugugucaacaauucuaaagaggaagaucccccuagaauguacugcuccaccgagggagaauggcucgugcccauuggcaaguguagcugcaacgcuggguacgaggagcggggauuuaugugucaggccugccgcccuggcuucuauaaggcucuggacgggaauaugaaaugcgccaagugucccccgcauuccucuacacaggaagauggaagcaugaacugcagaugugagaacaauuacuuucgggcggacaaagauccucccuccauggccugcacccgcccucccagcucucccagaaacguuaucuccaauauuaacgaaacgagcgugauccuugacuggucuuggccucuggauacaggcggccggaaggacgucaccuucaauaucauuuguaaaaagugcggguggaacaucaaacagugugagccgugcagccccaaugugcgcuuccucccuagacaauuuggacugacaaacaccaccguuacagugacggaucuucuggcucacaccaauuauacauucgaaauugacgccgucaacggcguguccgagcucucuucucccccucggcaguuugcugccgucuccaucaccacaaaucaggcggcccccagcccggugcugaccauuaagaaggauagaacgucucgcaacuccaucagccugucuuggcaagagccugaacaccccaaugggaucauucucgacuacgagguuaaauauuacgaaaagcaggagcaggaaacauccuauaccauccugcgggcuagaggaaccaacgugacaauuagcucccuuaaaccugacaccaucuacgucuuccagauucgcgcccggacagcugccggcuacgggaccaauucuagaaaguuugaguucgagacgagccccgauuccuuuucuaucagcggagaauccagccaagugguuaugaucgccauuucugcugcgguggccaucauucugcucacagucgugaucuaugugcugauuggccgcuucuguggcuacaaauccaagcauggggcugacgagaagcggcuucacuuuggaaacggccaucugaaacucccugggcugagaaccuauguugauccccacacauacgaagacccgacccaggccguccacgaguucgccaaggagcuggaugcuacgaacaucagcauugacaaaguggugggagccggcgaauuuggggaggucugcucuggccgccucaagcugccuuccaaaaaggaaaucagcguggcgaucaagacccuuaaaguuggauauacagagaagcagcggagagauuuccugggcgaagcuagcauuauggggcaguuugaccaucccaauaucauucgccucgagggaguggucaccaaaagcaagcccgugaugaucguuacagaguacauggaaaacggcucccuggauagcuuccugcggaaacacgacgcccaauucaccgugauucagcuugucgggaugcucagaggaaucgccucuggcaugaaguaucuguccgauaugggguacgugcaucgggaccuggcugcccgcaauauccucauuaacagcaaucugguuuguaagguguccgauuuuggccuuucuagaguccuggaggacgacccugaagcugccuacacgacacggggaggcaaaaucccgauuagauggaccagccccgaggcgaucgccuaucgcaaguucacauccgcuucugauguguggagcuacgggauugugcucugggaagucauguccuauggagagcggccuuacugggagaugucuaaccaggacguuaucaaagccguggaugaaggcuauagacugcccccucccauggacugcccugcugcccuguaccagcuuaugcucgauugcuggcaaaaggaccgcaauaacagacccaaauuugagcagaucgugagcauucuggauaagcugauccggaauccggggucccucaaaauuaucaccagcgcggccgcucgcccuucuaaccugcuucuggaccaguccaaugucgauauuaccacauucagaacgaccggagacuggcucaacggcguguggacagcccacuguaaggaaaucuuuaccgggguugaguauagcucuugcgauacaaucgcuaagauuuccaccgacgauaugaaaaaggugggcgucacggugguuggaccccagaaaaagaucauuagcucuaucaaagcccuggaaacacaauccaagaauggcccugugcccgucuga

SEQ ID NO: 3179 - RNA, 2952 nt, Artificial Sequence
  AAH63282 variant
auggacugccagcugagcauccuccugcuucuguccuguucugugcucgauagcuucggcgagcugauuccccaaccuuccaacgaagucaaucuucuggacucuaagaccauccagggggagcucggauggauuagcuacccgucccacggcugggaagagaucucugggguugaugaacauuauacacccauuagaacguaccaggugugcaacgugauggaccacagccagaauaacuggcugcggaccaauugggucccucgcaacuccgcccaaaagaucuauguggagcugaaguuuacacucagagauuguaauagcaucccccugguucuuggaaccugcaaagagacauucaaccuguacuauauggaaucugacgaugaccauggcgugaaguuucgggagcaccaguucaccaaaauugauacaaucgcugccgacgaauccuuuacccagauggaucucggggaccgcauucugaaacuuaauacggagaucagagaggucggaccugugaacaagaaaggcuucuaccuggcguuucaggauguuggcgcuuguguggcccucgucagcgugcggguguauuucaagaaaugccccuuuaccgucaagaaucuggccauguucccugacacaguuccgauggacucucaaucccugguggaagugcgcgggagcugugucaacaauucuaaagaggaagaucccccuagaauguacugcuccaccgagggagaauggcucgugcccauuggcaaguguagcugcaacgcuggguacgaggagcggggauuuaugugucaggccugccgcccuggcuucuauaaggcucuggacgggaauaugaaaugcgccaagugucccccgcauuccucuacacaggaagauggaagcaugaacugcagaugugagaacaauuacuuucgggcggacaaagauccucccuccauggccugcacccgcccucccagcucucccagaaacguuaucuccaauauuaacgaaacgagcgugauccuugacuggucuuggccucuggauacaggcggccggaaggacgucaccuucaauaucauuuguaaaaagugcggguggaacaucaaacagugugagccgugcagccccaaugugcgcuuccucccuagacaauuuggacugacaaacaccaccguuacagugacggaucuucuggcucacaccaauuauacauucgaaauugacgccgucaacggcguguccgagcucucuucucccccucggcaguuugcugccgucuccaucaccacaaaucaggcggcccccagcccggugcugaccauuaagaaggauagaacgucucgcaacuccaucagccugucuuggcaagagccugaacaccccaaugggaucauucucgacuacgagguuaaauauuacgaaaagcaggagcaggaaacauccuauaccauccugcgggcuagaggaaccaacgugacaauuagcucccuuaaaccugacaccaucuacgucuuccagauucgcgcccggacagcugccggcuacgggacgaauagcagaaaguuugaguucgagaccagccccgauuccuuuucuaucagcggagaauccagccaagugguuaugaucgccauuucugcugcgguggccaucauucugcucacagucgugaucuaugugcugauuggccgcuucuguggcuacaaauccaagcauggggcugacgagaagcggcuucacuuuggaaacggccaucugaaacucccugggcugagaaccuauguugauccccacacauacgaagacccgacccagacgguccacgaguucgccaaggagcuggaugccaccaacaucagcauugacaaaguggugggagcuggcgaauuuggggaggucugcucuggccgccucaagcugccuuccaaaaaggaaaucagcguggccaucaagacacuuaaaguuggauauaccgagaagcagcggagagauuuccugggcgaagcgucuauuauggggcaguuugaccaucccaauaucauucgccucgagggaguggucacaaaaagcaagcccgugaugaucguuaccgaguacauggaaaacggcucccuggauagcuuccugcggaaacacgacgcucaauucacggugauucagcuugucgggaugcucagaggaaucgccucuggcaugaaguaucuguccgauaugggguacgugcaucgggaccuggccgcucgcaauauccucauuaacagcaaucugguuuguaagguguccgauuuuggccuuucuagaguccuggaggacgacccugaagccgcuuacacaacccggggaggcaaaaucccgauuagauggacaagccccgaggccaucgcguaucgcaaguucaccuccgccucugauguguggagcuacgggauugugcucugggaagucauguccuauggagagcggccuuacugggagaugucuaaccaggacguuaucaaagcuguggaugaaggcuauagacugcccccucccauggacugcccugccgcucuguaccagcuuaugcucgauugcuggcaaaaggaccgcaauaacagacccaaauuugagcagaucgugagcauucuggauaagcugauccggaauccggggucccucaaaauuaucaccagcgccgcggcccgcccuucuaaccugcuucuggaccaguccaaugucgauauuacaacguucagaaccacaggagacuggcucaacggcguguggaccgcucacuguaaggaaaucuuuacagggguugaguauagcucuugcgauaccaucgccaagauuuccacggacgauaugaaaaaggugggcgucacagugguuggaccccagaaaaagaucauuagcucuaucaaagcucuggaaacccaauccaagaauggcccugugcccgucuga

SEQ ID NO: 3180 - RNA, 1389 nt, Artificial Sequence
  BAG54127 variant
augcccaugagcaccauccugccugugacauccccgugccuccccgccacgggcgucaccguuugggagcugaugacauucggggcugaaccuuacgccggacuuagacuggcggaggugcccgaccuccuggaaaagggcgagcggcuugcucagccucaaauuuguaccaucgauguguauauggucauggugaaaugcuggaugauugacgaaaacauccgccccacauuuaaggagcuggccaaugaguucaccagaauggcccgggauccuccgcgcuaccucguuauuaaaagagaaucugggcccggaaucgcuccuggccccgagccucacgggcugacaaacaagaaacuggaagagguggagcucgaacccgagcuggaccuugaucuggaccucgaagccgaggaagauaaucuggcuaccacgacccuuggaagcgcccugucccucccggucggcacacugaaccggccucgcggcucucagagccugcucucccccucuagcggguauaugccuaugaaucagggaaaccugggcgaguccugucaggagagcgcggugucuggguccagcgaaagaugcccccggcccguuucucuucauccuaugccgcgcggaugucuggccuccgagagcucugaaggccacgugaccggguccgaggcugaacuccaagagaaggucagcaugugcagaucccggucucgcagcagauccccucggccccgcggagacagcgccuaccauucucagagacacucccugcuuacacccgugaccccucugucucccccgggccucgaggaagaggaugugaauggcuaugucaugccugacacgcaucugaaggggacacccagcagccgggaaggaacccuguccucuguuggccucagcuccgugcuggggacagaggaagaggaugaggacgaagaguacgaauauaugaacagacgccggagacacagcccuccccacccuccccgcccgucuucccuugaggagcugggauacgaauacauggaugugggcagcgaccucucugcuucccuggggagcacccaguccuguccucuucaucccguccccaucaugccuaccgccggaacaacgccggacgaggauuaugaauacaugaaucggcagagagacggcggcgggcccggaggcgauuaugcggccaugggggcuugcccugccucugagcaaggauacgaagagaugcgcgcuuuucagggccccgggcaccaggccccucaugugcacuaugcccggcugaaaacccucagaagccuggaggcuacagacuccgcguucgauaaccccgacuacuggcacucucgccuguuuccuaaggccaaugcucagcggaccuga

SEQ ID NO: 3181 - RNA, 2766 nt, Artificial Sequence
  BAG57868 variant
augagagccaacgacgcucuccaggugcugggccugcuuuucagccuggcccggggguccgaggucggaaauucucaagcgguuugccccggcacccucaacgggcugagcgugacaggagaugcugaaaaucaguaccagacgcuuuauaagcuguacgagcgcugugaaguggucaugggcaaccucgagaucgugcugaccgggcacaaugccgaccuguccuuucuccaguggauuagagaaguuacaggauaugugcuggucgccaugaacgaguucucuacccuuccucugccgaaucuccgggugguucgcggcacacaaguguacgauggcaaauuugcuaucuucgucaugcugaacuauaauaccaacagcucccaugcccuuagacagcugcggcucacacagcugaccgagauucugucugggggaguguacaucgaaaagaaugacaaacucugccacauggauacgauugacuggcgcgauaucgugagagaccgggaugcugagaucgucguuaaggacaacggccgcagcugucccccuugccaugaaguguguaaagggagaugcuggggacccggcuccgaggauugucagacccugacaaagaccauuugcgccccucaauguaaugggcacugcuuuggacccaacccuaaucaguguugccaugacgagugcgcgggcggcuguagcgggccgcaggauacagacugcuucgccugucggcacuuuaacgacucuggagcuugcgugccccgcuguccucagccccuugucuauaacaagcugaccuuccaacucgaaccuaauccccacacgaaauaccaguacggcggggugugcguugccuccuguccgcauaacuuuguggucgaucagacaagcugcgugagagcuuguccucccgacaagauggagguugauaaaaauggacugaagaugugcgaaccuuguggcgggcuuugccccaaagccugcgagggaaccggcucuggcucccgguuccaaacaguggacagcucuaacaucgauggguuugucaauuguaccaagauucugggaaaccucgacuuccugaucaccggccugaauggggaucccuggcacaagauuccugcgcucgacccggaaaaacugaacguguuucgcacagucagagagaucacgggauaucuuaauauucaguccuggcccccucauaugcacaacuucagcguguucuccaaucugaccacaaucggcgggcggucucucuacaacagaggcuuuagccugcuuaucaugaagaaucugaacguuaccucccucggauuccgcagccugaaagagauuucugccggccggaucuauauuuccgcuaauagacagcugugcuaccaccauagccucaacuggacaaaggugcugcgcgggcccaccgaagaacggcuugauaucaaacacaacagaccucgccgggacugugucgccgaaggaaaggugugcgauccccuguguucuagcggcgggugcuggggaccgggcccugggcagugucucuccugcagaaauuauucucgcggcggaguuugugugacgcauugcaacuuucugaauggcgagccccgggaguucgcucacgaggccgaguguuuuagcugccauccugaaugccaacccauggaggggacagccaccuguaacggauccggcagcgauaccugcgcucagugugcgcacuucagagacgggccucacugcgucucuuccuguccccauggagugcugggcgccaaagggccgauuuacaaguauccugacgugcagaaugaaugccgccccugucacgagaacugcacacagggcuguaagggacccgaacuucaagacugccucggccagacccugguucugaucgggaaaacacaucucacgauggcucugaccgucaucgccggacuuguggugauuuuuaugaugcugggcgggacauuccucuacuggcggggaagacggauccagaauaagcgcgccaugagacgguaccuggagagaggcgagagcauugaaccucuggauccgucugagaaagcuaacaagguccuugcccgcaucuuuaaagaaaccgagcuccggaagcugaaggugcugggguccggcguuuucggaacagugcacaaaggcgucuggauucccgagggggaaagcaucaagaucccuguguguauuaaaguuaucgaggacaaguccggaagacagucuuuucaagcggugaccgaucacaugcucgcuauuggcagccuggaccaugcccacaucguccgccuucuggggcucugccccggauccucucugcagcuggugacgcaguaucuuccucucggcagccugcuggaucauguuagacagcaccggggcgcccucgggccccaacugcuucugaauuggggagugcagauugcuaaaggcauguacuaucucgaggaacaugggaugguccaccgcaaccuggccgcuagaaaugugcugcuuaaguccccuagccaggugcaagucgccgacuucggaguugcggaucuccugcccccggacgauaagcagcugcucuacucugaagccaaaaccccuaucaaguggauggcucuggaguccauucacuuuggcaaauauacacaucagagcgacguguggucuuacgggcagugcaucuggaugcccucccuuccuagccuggcccccgugucuaaccucccguucgagaccccuagcuga

SEQ ID NO: 3182 - RNA, 3927 nt, Artificial Sequence
  AAB59446 variant
augaagcccgccaccggccugugggugugggucagccuccugguugcugccgggacagugcagccuuccgacucucaaagcgugugcgcgggaacggaaaacaaacuuuccucucugagcgaucucgaacagcaguacagagcucugcggaaguauuacgagaauugugaagucgugaugggcaaccuugagaucaccuccauugaacacaaucgcgaccugucuuuccucagaagcguucgggaggugacaggguauguccugguggcccugaaccaguuucgcuaccucccgcuggagaaucuuagaaucauucggggaaccaaacuguaugaagaucgcuacgcccucgcuaucuuccugaacuauagaaaggacggcaauuuugggcuucaagagcugggacucaaaaaccugacagaaauucugaauggcggcguuuacguggaucagaacaaguuccucugcuacgccgacaccauccauuggcaggauaucguccggaaucccuggccuuccaaccugacacuugugagcaccaaugggucuuccggauguggccgcugccacaagagcuguacggggagaugcuggggacccaccgagaaccauugucagacacugacccggacagugugcgcugagcaaugugacggccgcugcuaugggccuuacgucucugauuguugccacagagaaugcgccggaggcuguuccggccccaaagacaccgauugcuuugcguguaugaauuucaacgacagcggggccugcguuacgcaguguccucagacauuuguguauaacccgaccacauuccagcucgagcauaauuuuaacgcuaaguacaccuauggagccuucugcgugaaaaaguguccccacaauuuugucguggauucuuccagcugcguucgggcuuguccuuccucuaaaauggaaguggaggaaaacggcauuaagaugugcaagcccuguaccgacaucugcccuaaagccugcgacgggauuggaacaggcagccugauguccgcgcaaacggucgauagcucuaauaucgacaaguucauuaacuguaccaaaaucaaugggaaccuuauuuuucuggugacaggaauccacggcgaucccuacaaugccaucgaggcuauugacccggagaagcucaacguuuuccgcaccgugagagaaaucacaggcuuccugaauauucaguccuggccucccaacaugaccgauuuuagcgucuucucuaaucuggugacgaucgggggacggguccucuauagcggccugucccuucugauucucaaacagcaagggaucacaucucugcaguuucagagccuuaaggagaucuccgccggaaacauuuacaucaccgacaauagcaaccugugcuacuaucauaccauuaacuggacaacccucuucucuacaaucaaucagagaauugugauccgcgauaaccggaaagcugaaaauuguacggccgagggcaugguuugcaaccaccuguguuccagcgacgggugcuggggcccuggacccgaucaaugucugucuugcagacgcuuuucccggggcagaaucuguauugaaagcugcaaucucuacgacggggaguuccgcgaguuugaaaacggauccaucuguguggagugcgauccccagugcgaaaagauggaggacggccugcuuaccugucaugggccuggaccggacaauugcacaaaguguucucacuucaaagauggccccaacugcgucgaaaaguguccugacgggcugcagggcgccaauagcuuuauuuucaaauaugcugaucccgaccgggagugccacccuugucaucccaacugcacccagggauguaauggcccgacaucccacgauugcaucuacuauccuuggaccgggcauucuacgcucccccaacacgcgagaaccccucugauugccgcuggagugaucggcgggcuguuuauucuuguuaucgugggacucacauucgccgucuacgugcgcagaaagagcaucaaaaagaagagagcccugcgccgguuucuggagaccgaacucguggagccccugacaccuuccggcaccgcucccaaccaggcccagcuucggauucugaaagaaacggagcucaagcggguuaaaguccuggggagcggcgcguucggaacaguguauaagggcaucugggugccggagggggaaaccgucaaaauuccuguggcuaucaagauucugaaugagacaaccggacccaaggccaacguugaguucauggacgaagcccuuaucauggcuucuauggaucauccccaccucgugcgccugcugggcgucugucucuccccuaccauccagcuggugacacaacuuaugccgcacgggugccugcucgaauacguucaugagcacaaagacaauauuggaagccagcugcugcuuaacuggugcgugcagaucgccaagggcaugauguaccucgaggaaagacggcugguccauagagaucuggcugcccgcaacgugcucguuaaaucucccaaucacgugaagauuacggacuuugggcuggcgcggcuucuggagggcgaugaaaaagaguauaacgccgacggaggcaagaugccuaucaaguggauggcucucgaauguauucacuacagaaaauucacccaucaguccgaugucuggagcuauggggugacaaucugggagcugaugaccuuuggaggcaagcccuacgacgggaucccuacacgcgagauucccgaccugcuugaaaaaggagagagacucccucaacccccgaucugcaccauugauguguauauggucaugguuaaguguuggaugaucgacgccgauucucggccuaaauucaaggaacuggcugccgaguuuagccgcauggcgagagacccccagcgguaccuggugauucagggcgaugaccgcaugaaacucccuucccccaaugauagcaaguucuuucaaaaccugcuugacgaagaggaucuggaggacaugauggaugccgaagaguaucucgugccgcaggcuuucaauaucccucccccuaucuacacgucuagagcccggauugacuccaaccgcagcgaaaucggccacuccccuccgcccgcuuacacacccaugucugggaaucaguuugucuauagagauggaggcuucgccgccgagcagggggugagcguucccuaccgggcuccuaccuccaccauucccgaggcgccuguggcccaaggagcuacagccgaaaucuuugacgacucuugcuguaacggcacccugcgcaagcccgucgccccucaugugcaggaggauagcuccacacagagauauucugcugacccgacgguuuucgcccccgaacggagcccuagaggggagcuggaugaagagggauacaugacccccaugcgcgacaaaccuaagcaggaguaucuuaaucccguggaagagaacccguuugucucccggcgcaaaaauggcgaucugcaagcgcucgacaacccugaauaccacaaugcuagcaacggcccucccaaggccgaggaugaauaugugaaugagccccuguaccucaacacauucgccaacacccuggggaaagcugaguaccuuaagaauaacauucugucuaugcccgaaaaggccaaaaaggcguucgacaauccugauuauuggaaccauucccucccgcccagaagcacacugcagcacccugacuaccugcaggaguauucuaccaaauacuuuuauaagcagaauggacggaucagacccauuguugcugaaaacccugaguaccuuuccgaguucagccugaaacccggcacggugcucccgccucccccuuaucgccaccggaauaccgucguguga

SEQ ID NO: 3183 - RNA, 1461 nt, Artificial Sequence
  CCDS46648.1 variant
augauccagaccgugcccgacccugccgcucacauuaaggaggcccugagcgucguuuccgaagaucaaucucucuucgagugcgcguacggcacaccgcaucuggcuaaaacggaaaugaccgccagcuccucuagcgacuaugggcagacauccaagaugucucccagagugccucagcaggauuggcuuagccaacccccugcccgggugaccaucaaaauggaguguaaccccucccaggucaauggaagccgcaacucuccugacgaaugcuccguggcuaagggcgggaaaaugguuggaagcccggauacagugggcaugaauuacgggucuuauauggaggagaagcacaugcccccucccaacaugaccacaaaugaaagacgggucauugugccugccgaccccacccugugguccacggaucauguucgccaguggcucgagugggcugugaaggaauacggacugccggacgucaacauccuucuguuucagaauauugauggcaaagagcucuguaagaugaccaaagacgauuuccaaagacugacaccuagcuauaacgccgacauccugcucucucaucugcacuaccuucgggagacaccccugccucaccucaccuccgaugacguggacaaggcgcugcagaauagcccccgccuuaugcacgccagaaacaccggcggggcugccuuuaucuuccccaauacguccguguauccugaagcuacacagcggauuaccacacgcccggaucugcccuacgagccucccagacggucugccuggaccggacauggccacccuacaccccagagcaaagcggcccaaccguccccuagcaccguccccaagacggaagaccagcgcccucagcucgaucccuaccaaauccuggggccuaccucuuccagacuggcuaaccccggaagcggccagauucagcucuggcaguuucugcuugagcugcucucugacagcuccaauucuagcugcaucacaugggaagggaccaacggagaguucaagaugacagauccggacgagguugcccggcgcuggggcgaaagaaaauccaagccuaauaugaacuaugauaaacugagccgggcucuuagauacuauuacgacaagaacauuaugaccaaagugcauggcaagcgcuaugccuacaaauuugauuuccacgggaucgcccaagcucugcagccccaucccccugagucuucccucuauaaguacccgagcgaccugcccuacaugggaucuuaucacgcgcacccucagaagaugaauuuuguggcuccccauccucccgcccugccugucacguccagcuccuucuuugccgcccccaacccguacuggaacucuccuacaggcgggauuuaucccaauacccggcucccuaccagccacaugcccucccaucugggaacauacuauuga

SEQ ID NO: 3184 - RNA, 1359 nt, Artificial Sequence
  AAA19786 variant
augagcgagacccccgcccagugcuccaucaagcaagaaagaauuucuuacacaccuccggagagccccgugccuuccuaugcuucuagcacgccccugcacgucccuguuccccgggcccuccgcauggaagaggacuccaucagacugccugcgcaucuucggcugcagccgauuuacuggucucgcgaugacguggcucaguggcucaaaugggccgaaaacgaguucagccugagacccaucgauuccaauaccuuugagaugaacggcaaggcccuucugcuccugacaaaagaagacuuccgguaucgcagcccucacucuggggaugugcuguacgagcuccugcagcauauucuuaagcaaagaaaaccccggauccuguuuuccccuuucuuucaccccggaaauagcauccauacccagccggaagucauucuccaccagaaccacgaggaggacaauugugugcagcgcacaccuagacccucuguugauaacgugcaucacaauccucccaccaucgaacugcuucaucggucccgcagccccauuacaaccaaccacagaccuucuccggaccccgagcaacggccucugcgcagcccccucgauaauaugaucagacggcuguccccugcugaaagagcccagggcccccgcccgcaccaggagaacaaucaucaggaauccuauccucugucugucagccccauggagaacaaucacugcccugcuuccagcgagucucaucccaagccuuccagcccccggcaagaaucuacgagagugauucagcucaugccgagcccuaucaugcacccccugauucuuaacccccgccauuccguugacuucaagcagucucggcugagcgaggaugggcuccacagagaaggaaaaccuaucaaucugucccaccgcgaggaccuugccuacaugaaccauaucauggugagcgucucuccgcccgaagaacacgcgaugccuauuggccggaucgccgauuguagacugcucugggacuauguguaccaacugcuguccgacagccgcuacgagaacuuuauucggugggaagauaaggagucuaaaaucuucagaauuguggaccccaaugggcucgcucgccuguggggaaaccauaagaaucggaccaacaugacauaugagaaaauguccagagcccuucggcacuacuauaagcugaauaucauccgcaaggagccuggccagagacuccuguuucgguucaugaaaacccccgaugaaauuaugagcggcagaacagaccgccuugagcaccuggagucccaggaacucgaugagcagaucuaccaagaagacgagugcuga

SEQ ID NO: 3185 - RNA, 1971 nt, Artificial Sequence
  AAH04817 variant
auggccagcaccgacuacuccacauauucucaggcugccgcgcaacagggcuacagcgcuuauacggcccagcccacccagggguacgcccaaacaacccaggcuuauggacagcaguccuacggcacauaugggcaaccuaccgaugugucuuacacacaggcccagaccacggcuaccuacggacagacagccuaugcgaccagcuacggccaaccgcccacaggguauaccacgccuacagcuccccaggccuacucccagccuguccaaggauauggcaccggcgccuacgacacaaccaccgcuacaguuacgaccacacaggccucuuaugcggcccagagcgcuuacgggacccagcccgccuacccugcuuauggacaacagccggccgccacagcucccaccagaccucaggauggcaacaagcccacggagacaucccagccucaaagcucuaccgggggauacaaucagcccucccugggcuaugggcagagcaacuacucuuauccccaggugccuggauccuaccccaugcaaccugugaccgcgccgcccagcuauccuccgacaucuuacuccagcacccagcccacauccuacgaccagucuagcuauucccagcaaaauacguacggccagccuagcucuuauggccagcaauccagcuacgggcagcagucuagcuauggacagcaacccccuaccuccuaucccccgcagacaggcucuuacagccaggccccuucccaguacagccaacagucuuccagcuacgggcagcagucuuccuuccggcaagaucaccccagcuccaugggagucuauggccaggaaucugggggauuuagcggcccuggcgagaaccgcuccaugucugggcccgacaauagaggacggggccgcgggggauucgauagaggcgggaugagccggggcggacgcggcgggggaagaggcgggaugggauccgcuggcgaaagagggggcuuuaacaaaccuggaggccccauggacgaggggccggaucucgaccugggaccucccguggaucccgacgaagauagcgacaauucugccaucuacguucagggccuuaacgacuccgugacccuggaugaccucgccgauuucuuuaagcaaugcggggucgugaaaaugaauaagcgcacaggacagccuaugauucauaucuaucuggacaaagagaccggcaagccgaagggggaugcuacgguuagcuacgaggaucccccuaccgccaaagcggcuguggaaugguucgacggcaaggacuuucagggaucuaaacuuaaggucucccuggcccggaaaaagcccccuaugaacagcaugcggggcgggcugcccccucgcgagggaagaggcaugcccccgccucuccgcgggggacccggcgggccuggcggacccggcgggccgaugggacggaugggcgggagaggaggcgaucggggcggguucccucccagaggaccucgcggcucucgggggaaucccagcggaggcgggaacgugcagcacagagccggagacuggcaaugucccaauccuggcugcggcaaccagaauuuugcuuggcgcacagaauguaaccagugcaaggccccgaaacccgagggguuccugccucccccuuuucccccuccgggaggcgaucgggggagaggaggccccgggggaaugcgcggcggcagagggggacucauggaccggggcgggccuggaggcauguuccgcgggggacggggcggcgacagagggggauuucgcggcgggcggggaauggauagaggcggguucggaggcggccggcgcgggggacccggcgggccucccggaccgcugauggagcagaugggcgggagacggggaggcagaggcgggccuggaaagauggacaaaggcgaacaucgccaagagcggagagaucgccccuauuga

SEQ ID NO: 3186 - RNA, 1998 nt, Artificial Sequence
  AEA07595 variant
augggccagaccgggaagaaaagcgagaagggacccgugugcuggagaaaacgggucaaguccgaauacaugcgccugagacaacucaaacgguuccgcagagccgacgagguuaagucuauguuuagcuccaaccggcagaagauccuggaacgcacagagauucuuaaucaggaauggaaacagagacggauccaaccugugcacauucugacgucugugagcucccuccgcggcaccagagaggucgaggaugaaacagugcugcauaacaucccguauaugggggacgagguucuugaucaggacggaaccuucauugaagaacugaucaagaauuacgauggcaaagugcacggggaccgggaguguggauuuaucaacgaugaaauuuucgucgagcucgugaaugcucugggccaguauaacgacgaugacgaugacgaugacggcgacgaucccgaagaacgcgaagagaagcagaaagaccuggaggaucauagagacgauaaggaaucucggccuccccgcaaguuuccuagcgacaaaaucuucgaggccauuuccagcauguuucccgauaaggggacagcggaggagcucaaagaaaaguacaaagagcugaccgagcaacagcuuccuggagcucugccgcccgaaugcacaccuaauaucgacggccccaacgccaagucuguucagagagagcagucccuccacagcuuccauacccuguuuugucggagaugcuucaaauaugauuguuuucuucacccuuuccacgccacgcccaauaccuacaagcgcaagaacacagaaaccgcucuggacaauaaaccgugcgggccucaauguuaucagcaucucgagggagccaaggaauuugcugccgcgcugacagccgagcggauuaaaacgcccccuaagagacccggcgggcgccggagaggacgccugcccaacaauucuucccggccuagcaccccgacaaucaacgugcucgagucuaaagauaccgacuccgacagagaagcuggcacagagaccggcggggaaaauaacgauaaggaggaggaagagaagaaagacgaaaccagcuccucuagcgaggccaacucccgcugccagacacccauuaagaugaaaccuaauaucgaacccccugagaacgucgaguggagcggagcugaagccucuauguuccgggugcugaucggcacguacuacgauaauuucugugcgauugccagacuuaucgggaccaagacaugccgccaaguguaugaguuucgggucaaagaauccagcauuaucgcucccgccccggcugaggacguugauaccccucccagaaagaagaaacggaagcaccgccugugggccgcccauuguagaaaaauucagcucaagaaaggacagaaccgguucccuggcugcagaugcaaggcucaguguaauacaaagcaaugccccuguuaccuggcggugcgcgaaugcgacccugaucuuugucugaccugcggggccgcugaccacugggauucuaaaaacgugagcuguaagaauugcuccauccagcggggaucuaaaaagcaccuccugcuggcccccagcgacgucgccggcuggggcaucuuuauuaaagauccggugcagaagaacgaguucaucuccgaguauuguggggaaauuaucagccaggacgaggcugauagacgcggaaaaguuuacgacaaguauaugugcucuuuucucuucaaucugaacaaugacuuuguggucgaugccacgagaaagggcaacaaaauucgguucgcgaaucauuccgugaacccuaauuguuacgcuaagguuaugauggugaacggggaccaccgcaucggaaucuuugccaaaagagccauucaaacaggcgaggagcuuuucuuugauuaucgguacagccaggcugacgcccugaaguacgucgggaucgaacgcgagauggagauucccuga

SEQ ID NO: 3187 - RNA, 1005 nt, Artificial Sequence
  EAW80068 variant
augggccagaccgggaagaaaagcgagaagggacccgugugcuggagaaaacgggucaaguccgaauacaugcgccugagacaacucaaacgguuccgcagagccgacgagguuaagucuauguuuagcuccaaccggcagaagauccuggaacgcacagagauucuuaaucaggaauggaaacagagacggauccaaccugugcacauucugacgucugugagcucccuccgcggcaccagagaguguucugucacaagcgaucuggacuucccgacccaggugaucccccuuaagacacugaacgcuguugccuccgugccuauuauguauagcuggucuccccuccagcagaauuuuauggucgaggaugaaaccgugcugcauaacaucccuuacaugggggacgagguucuggaucaagacggaacauucaucgaagaacucauuaaaaauuaugauggcaaggugcacggggaccgggagugcggauuuaucaacgaugaaauuuucgucgagcuggugaaugcgcuuggccaguacaacgacgaugacgaugacgacgauggcgacgaucccgaggagcgcgaagagaaacagaaggaccuggaggaucauagagacgauaaggaaucccggccuccgcgcaaauuucccagcgacaagaucuucgaggcuauuucuuccauguuuccugauaaagggaccgccgaggaacucaaggaaaaauauaaggagcugacggagcagcaacuucccggagcccugccucccgaauguaccccgaauaucgacggcccuaacgcuaaaagcgugcagagagagcagucucuccacuccuuccauacacuguuuugccggagauguuucaaguacgauugcuuucugcaccccuuccacgccaccccuaauacauauaagcgcaaaaacaccgaaacggcucucgacaauaagcccugugggccccaaugcuaccagcaucugccucuucugccgcggaacuga

SEQ ID NO: 3188 - RNA, 195 nt, Artificial Sequence
  CCO13726 variant
augccccuggugaacaucaugaugaugaccaugaugaugauggagacaauucucaagaaagaaaagaaaagcagaaagaucuggcggauuacggagaugaucaaaaaggccgcucaccugggcaauuuccuucugauuaaguuucucaaaccuuucccgcagugcuuucaaauccgcgcccagcagaagaacuga

SEQ ID NO: 3189 - RNA, 2241 nt, Artificial Sequence
  AAC51520 variant
augggccagaccgggaagaaaagcgagaagggacccgugugcuggagaaaacgggucaaguccgaauacaugcgccugagacaacucaaacgguuccgcagagccgacgagguuaagucuauguuuagcuccaaccggcagaagauccuggaacgcacagagauucuuaaucaggaauggaaacagagacggauccaaccugugcacauucugacgucugugagcucccuccgcggcaccagagaguguucugucacaagcgaucuggacuucccgacccaggugaucccccuuaagacacugaacgcuguugccuccgugccuauuauguauagcuggucuccccuccagcagaauuuuauggucgaggaugaaaccgugcugcauaacaucccuuacaugggggacgagguucuggaucaagacggaacauucaucgaagaacucauuaaaaauuaugauggcaaggugcacggggaccgggagugcggauuuaucaacgaugaaauuuucgucgagcuggugaaugcgcuuggccaguacaacgacgaugacgaugacgacgauggcgacgaucccgaagaacgcgaagagaaacagaaggaccuggaggaucauagagacgauaaggaaucccggccuccgcgcaaauuucccagcgacaagaucuucgaggcuauuucuuccauguuuccugauaaagggaccgccgaagaacucaaggaaaaauauaaggagcugacggagcagcaacuucccggagcccugccucccgaauguaccccgaauaucgacggcccuaacgcuaaaagcgugcagagagagcagucucuccacuccuuccauacacuguuuugccggagauguuucaaguacgauugcuuucugcaccccuuccacgccaccccuaauacauauaagcgcaaaaacaccgaaacggcucucgacaauaagcccugugggccccaaugcuaccagcaucuggagggagccaaagaguucgcggccgcucuuacagccgagcggauuaagaccccuccgaaaagacccggcgggcgccggagaggacgccugccuaacaauagcucccggcccucuacaccuaccaucaacguccucgagagcaaggacaccgauuccgacagagaagcuggcacagagacgggcggggaaaacaaugauaaggaggaggaagagaaaaaggacgaaaccucuagcuccagcgaggccaacucucgcugucagacacccaucaaaaugaagccgaauauugaaccucccgagaacguugaguggagcggagcggaagccuccauguuucgggugcugaucggcaccuacuaugauaauuucugcgcuauugccagacuuaucgggacaaaaaccugucgccagguguacgaguuucgggucaaggaaucuagcauuaucgcuccugcccccgccgaggacguggauacgccucccagaaagaaaaagcggaaacaccgccugugggcugcgcauugcagaaagauccaacucaaaaaggacggauccagcaaccacguuuauaauuaccagccgugcgaucacccucggcagcccugugacucuuccugccccugugugauugcccagaacuucugcgaaaaguuuugucaaugcagcucugagugucagaauagauucccuggcugccgcuguaaagcucagugcaacacaaagcaguguccgugcuaucuggccguccgggagugcgaucccgaccugugucugaccugcggggccgcugaucauugggacuccaaaaaugugagcuguaagaacugcuccauccaaagaggaucuaaaaagcaucuccuucuggccccuagcgacguugcgggcuggggcauuuuuaucaaagaucccgugcagaagaaugaguucauuuccgaguacuguggggaaaucaucucucaggacgaggcugaucgcagaggaaaggucuaugacaaauacaugugcagcuuucucuucaaccugaauaacgauuuuguggucgacgccacccggaagggcaacaaaauucgcuucgccaaucacuccgugaacccuaauuguuacgcuaagguuaugauggugaacggggaucacagaaucggaauuuuugccaaacgggcuauccagacaggcgaggagcuuuucuucgacuaucgcuacagccaagccgaugcgcugaaguaugucgggauugagagagaaauggagauccccuga

SEQ ID NO: 3190 - RNA, 2124 nt, Artificial Sequence
  AEN79481 variant
augggccagaccgggaagaaaagcgagaagggacccgugugcuggagaaaacgggucaaguccgaauacaugcgccugagacaacucaaacgguuccgcagagccgacgagguuaagucuauguuuagcuccaaccggcagaagauccuggaacgcacagagauucuuaaucaggaauggaaacagagacggauccaaccugugcacauucugacgucugugagcucccuccgcggcaccagagaggucgaggaugaaacagugcugcauaacaucccguauaugggggacgagguucuugaucaggacggaaccuucauugaagaacugaucaagaauuacgauggcaaagugcacggggaccgggaguguggauuuaucaacgaugaaauuuucgucgagcucgugaaugcucugggccaguauaacgacgaugacgaugacgaugacggcgacgaucccgaagaacgcgaagagaagcagaaagaccuggaggaucauagagacgauaaggaaucucggccuccccgcaaguuuccuagcgacaaaaucuucgaggccauuuccagcauguuucccgauaaggggacagcggaggagcucaaagaaaaguacaaagagcugaccgagcaacagcuuccuggagcucugccgcccgaaugcacaccuaauaucgacggccccaacgccaagucuguucagagagagcagucccuccacagcuuccauacccuguuuugucggagaugcuucaaauaugauuguuuucuucacccuuuccacgccacgcccaauaccuacaagcgcaagaacacagaaaccgcucuggacaauaaaccgugcgggccucaauguuaucagcaucucgagggagccaaggaauuugcugccgcgcugacagccgagcggauuaaaacgcccccuaagagacccggcgggcgccggagaggacgccugcccaacaauucuucccggccuagcaccccgacaaucaacgugcucgagucuaaagauaccgacuccgacagagaagcuggcacagagaccggcggggaaaauaacgauaaggaggaggaagagaagaaagacgaaaccagcuccucuagcgaggccaacucccgcugccagacacccauuaagaugaaaccuaauaucgaacccccugagaacgucgaguggagcggagcugaagccucuauguuccgggugcugaucggcacguacuacgauaauuucugugcgauugccagacuuaucgggaccaagacaugccgccaaguguaugaguuucgggucaaagaauccagcauuaucgcucccgccccggcugaggacguugauaccccucccagaaagaagaaacggaagcaccgccugugggccgcccauuguagaaaaauucagcucaagaaagacggaucuagcaaccacguguacaauuaucagccuugcgaucacccccggcagccuugcgacuccucuugucccugcgugaucgcucaaaacuucugugaaaaguuuugccaguguagcuccgagugccagaauagauucccgggcugucgcugcaaggcgcaguguaacacaaaacaaugcccuuguuaccuggccguccgggagugcgaucccgaccuuugccugaccuguggggcugccgaucauugggacagcaagaaugugucuugcaaaaacuguuccauccagagaggaagcaagaaacaccuccugcuggcccccucugauguugcuggcuggggcauuuuuaucaaggacccugugcagaaaaaugaguucauuuccgaguauugcggggaaaucauuagccaggacgaggccgaucgcagaggaaaggucuacgacaaguauauguguuccuuucucuucaaccugaauaacgauuuugugguugacgcgacgcggaaaggcaauaagauccgcuucgcuaaccauucugugaacccgaauugcuacgccaaagucaugauggugaacggggaucacagaaucggaauuuuugccaagcgggcuauccaaacaggcgaggaacuuuucuuugacuaccgcuauagccaggccgaugcucugaaauacgucgggauugagagagaaauggagauccccuga

SEQ ID NO: 3191 - RNA, 399 nt, Artificial Sequence
  AAB87141 variant
augguggaggccuucugcgcuaccuggaagcugacaaacagccagaauuuugacgaauacaugaaagcccucggcgucggguucgcgacgagacaaguuggaaacgugaccaagcccacagugaucauuucccaggagggcgauaaagucgugauccggacccugucuacauuuaagaauaccgaaauuagcuuccagcuuggggaggaauuugacgagacaaccgcugaugaccgcaacuguaaauccguugugucucuggauggagacaagcucguccacauccagaagugggauggcaaagagacgaauuucgugagagaaauuaaggacgggaaaaugguuaugacccugacauuuggagauguggucgccgugcggcauuaugagaaggccuga

SEQ ID NO: 3192 - RNA, 765 nt, Artificial Sequence
  CAA36870 variant
auguggcagcugcuccugcccaccgcccuucugcuccuggugagcgcuggcaugagaacagaggaccuuccuaaggccgucguuuuccuggaaccgcaaugguaccgggugcucgagaaagauuccgugacgcugaagugccagggggcguauucucccgaagacaacagcacccagugguuucacaaugagucccugaucucuagccaggcuuccucuuacuucauugaugccgccacagucgacgauagcggagaauaucgcugucaaaccaaccucuccacacugagcgacccugugcagcuugagguucauaucggcuggcugcuccugcaggcucccagauggguguuuaaagaggaagauccuauucaccuucggugccauucuuggaagaauaccgcccugcacaaagucacauaccuccagaacgggaagggacgcaaguauuuccaucacaauuccgacuuuuacauccccaaagcuacccugaaggauagcggcucuuauuucuguagagggcuguuuggauccaaaaacgugagcucugagacgguuaauauuaccaucacacaaggccucgccguguccaccaucagcuccuucuuuccuccgggcuaccaggucucuuucugccuggugauggugcuucuguuugcggucgacacagggcucuacuucagcguuaagaccaacauucgguccagcacgcgcgauuggaaagaccacaaguuuaaguggagaaaagauccccaggacaaguga

SEQ ID NO: 3193 - RNA, 873 nt, Artificial Sequence
  CCDS1232.1 variant
augggcgggggagccggcgagagacuguucaccagcuccugccucguggggcuggucccccuuggacugcggaucucucucguuacauguccucugcagugcggcauuauguggcaacuucugcucccgacggcucugcugcuccuggugagcgccgggaugcgcaccgaagaccuucccaaggcgguggucuuucuggagccucagugguacagagugcucgaaaaagauuccguuacacugaagugucagggagcuuauucucccgaggacaacagcacccagugguuccacaaugaaucccuuaucucuagccaagccuccagcuacuuuauugaugccgcuacaguggacgauucuggcgaguaucggugccagaccaaccuguccacacucagcgacccuguccagcuggaggugcauaucggcuggcugcuccugcaggcuccccgcuggguuuucaaagaagaggauccuauucaccuuagaugucauucuuggaagaauaccgcccugcacaaagugacguaccuccaaaacgggaagggacggaaguauuuucaucacaauuccgacuucuacaucccgaaagccacccugaaggauagcggcucuuauuuuugccgcgggcuuuucggauccaaaaacgucagcuccgaaacagugaauaucaccauuacacagggccuggcggugucuaccaucagcuccuuuuucccucccggguaccaggucagcuuuugucucguuauggugcugcuguucgccguggacacgggacucuacuuuucugucaagacaaacauuagauccagcacccgggauuggaaagaccacaaguucaaguggcgcaaagauccccaggacaaguga

SEQ ID NO: 3194 - RNA, 807 nt, Artificial Sequence
  AAH74858 variant
augagccuguccuuccuccugcuucuguuuuucucucaccucauccugagcgccugggcccauggcgaaaagagacuugcccccaaagggcagccuggaccggcggcuaccgaccggaacccccgcggcuccucuagcagacaauccucuagcuccgccauguccucuuccagcgccucuuccagcccugcugccucucuggggucccagggaagcggccucgaacaguccucuuuucaguggagccccuccgggcggcgcacaggaagccuguacugcagagugggcauuggcuuccaucugcaaaucuauccugaugggaaggucaauggaucucacgaggcuaacaugcucuccguucuggaaauuuuugccgugagccagggcaucguggggauucggggagucuucucuaauaaauuucuugcgaugagcaagaaaggcaagcugcacgccuccgcuaaguucacggacgauuguaaauuucgcgagagauuccaggaaaacucuuacaauaccuaugccagcgcuauccaucggacagagaagaccgggcgcgagugguacguggcccucaacaaaagaggaaaggcgaaacggggcugcagcccccgcguuaagccucagcacaucagcacacacuuucugccgagauucaagcaaucugaacagcccgagcuuuccuuuaccgugacagucccugagaaaaagaaacccccuagccccauuaagccgaaaaucccucugucugcuccccggaagaauaccaacuccgugaaauaucgccucaaguucagauucggcuga

SEQ ID NO: 3195 - RNA, 117 nt, Artificial Sequence
  AAB06462 variant
augagcaccagaugcggcgaggccgggcgggcucgcggaacacagccccacagaggcuaccgggcccaaaaccagccuuauaagaugcaucuggggccgccccgccucgaagaguga

SEQ ID NO: 3196 - RNA, 2466 nt, Artificial Sequence
  AAA59470 variant
auggugagcuggggcagauucaucugccuggucguugugaccauggccacacucucccuggcucggcccucuuuuagccuuguggaggacacgacccuggaaccugaggaaccgcccacaaaguaccagauuucccaaccugaggucuauguggccgcgcccggggaaucucucgagguucgcugucugcuuaaagaugcugccgugaucagcuggaccaaggacggaguccaccugggcccuaacaauagaacagugcucauuggggaguaccugcagaucaaaggagccacaccccgggauuccggccuguaugcuugcaccgccucucgcaccguugacagcgaaacgugguacuucauggugaacgucaccgaugcuauuuccagcggggacgaugaggacgauacagacggagccgaagauuuugugucugaaaauuccaacaauaagagagcgccuuauuggaccaacacagagaaaauggaaaagcggcuccaugccgugccggcugccaauaccgucaaguuccgcugucccgcuggcggcaacccuaugcccacgaugagauggcugaaaaaugggaaggaguuuaaacaggaacaccggaucggaggcuacaagguucgcaaccagcauuggagccuuaucauggagucuguggugccuuccgacaaagggaauuauacaugcgucguggaaaacgaguacggaagcauuaaucacaccuaccaucuggauguuguggagagaucuccccaccggccgauccuccaagccggccugccugcgaacgccuccacagucguugggggagacguggaguucguguguaaggucuauagcgacgcucagccccacauucaguggaucaagcauguggagaaaaauggcuccaaguacggcccugaugggcuucccuaucugaaaguccucaaggccgcuggagugaacaccaccgacaaagaaauugagguucuguacauccgcaacgugacauuugaagaugccggcgaguauacgugccuggccggaaauucuauuggaaucagcuuccacuccgcuuggcucaccguccugcccgcgccuggcagagagaaggaaaucacagccagcccggacuaccuugagauugcuaucuauuguauugggguguuucugaucgccugcaugguugugaccgucauucucugucggaugaaaaacacaaccaagaagcccgauuucucuucccagccugccgugcauaaacugacgaagcgcaucccccuuagacggcaagugacaguuagcgcugaaucuagcuccucuaugaauagcaacaccccucuggucagaaucaccacacgccucuccagcaccgccgacacacccaugcuggcgggagugucugaguacgaacugccggaggauccuaaaugggaguuuccccgggacaagcucacgcugggcaaaccucuuggcgaagggugcuucggacagguggucauggcugaggccgugggcauugauaaggacaagcccaaagaagccguuaccguggcugucaagaugcugaaagaugacgccacagagaaggaccucuccgaucuggugagcgagauggaaaugaugaaaaugaucgggaagcacaagaauauuaucaaccuucugggagcuuguacccaggacggcccucucuacguuauuguggaguaugccucuaaagggaaucugagagaauaccugcgcgcgcggagacccccgggcauggaguauuccuacgauaucaaccgcgucccugaggaacagaugacauuuaaggaccucgugagcugcaccuaucaacuggcccggggaauggaguaccuugcuucccagaaaugcauccacagagaucuggccgcucgcaauguucucgugacggaaaacaaugucaugaagauugccgacuucggccuggcgcgggauaucaacaauauugacuauuacaaaaagaccacaaacgggagacugcccgugaaguggauggcccccgaggcucuuuucgaucgcguguacacccaucagucugacgucuggagcuuuggaguucucaugugggaaaucuucacacugggcggguccccuuauccggggauucccguggaggaacuguuuaaacuccugaaggagggccaccggauggauaaaccugccaauuguaccaacgagcuuuacaugaugaugagagacugcuggcaugcugugcccucucaacggccuacguucaagcagcuggucgaagaucucgaccgcauccugacacugaccacaaacgaggaauaucuugaccucagccagccccuggagcaguacuccccuagcuaucccgauaccagaucuuccuguagcucuggggacgauuccguguuuagcccggacccuaugcccuacgaaccuugccugccccaauauccgcacauuaauggcucuguuaaaaccuga

SEQ ID NO: 3197 - RNA, 1908 nt, Artificial Sequence
  EAW74574 variant
auggcucccccucugcuccugcuucugcucgccagcggcgccgcggcuugcccgcugcccugugugugccagaaccuuuccgagucucugagcacccucugugcccacagagggcugcuguucgucccucccaauguugaccggcgcacaguggaacucagacuggccgauaacuuuauccaagcucuuggaccucccgacuuccggaauaugacgggccugguggaucucacccugucccgcaacgccauuacaagaaucggggcucgggccuuuggagaccuugagucucugcgcagccuccaucuggauggcaauagacuggucgaacucgggaccggaucccugcggggcccugugaaccuucagcaccugauucucucuggcaaucagcuggggcgcaucgcgccgggagccuucgacgauuuucuugagagccuggaagaccucgaucuguccuacaacaaucugagacagguucccugggcuggcauuggggccaugccugcucuccauacacugaaccuugaccacaaucugaucgaugcccugcccccuggagcguucgcccaacucggccagcuuagccggcuggaccucaccucuaaccgccuggcuacacuggcccccgauccgcucuuuuccagagggcgggacgcugaggccagcccugcuccccuggugcuuucuuucuccggaaauccucugcauugcaacugugagcuccuguggcugcgcagacuugcccggcccgacgaucucgaaaccugcgcgucucccccuggccuggccggcagauauuuuugggcugucccggagggggaguucagcugugaacccccucugaucgcccgccacacgcagcggcucugggugcuggagggacagagagccacccuucgcugccgggcucugggcgaccccgccccuacaaugcacuggguugggcccgaugacagacucgugggaaauuccagccgcgcgcgggcuuuuccgaacggcacccuggaaauuggggucacaggagccggcgaugccggcggguacaccuguaucgcuacgaacccugccggagaggcuacagccagaguggaacugcgcgugcuugcgcucccccauggcgggaacuccucugccgagggaggccggccugggcccagcgacauugcugccuccgcuagaaccgccgcggaaggcgagggaacacuggagagcgaaccugccguccaaguuaccgaggugaccgcuacaucuggccugguguccugggggcccggacgcccggccgauccugucuggauguuccagauccaguauaauagcucugaagacgagacgcucauuuaccggaucgugcccgcuagcucccaccauuuucugcuuaagcaccugguucccggcgccgauuaugaccucugccugcuggcccuuucuccugcugcggggccgagcgaucucaccgccacaagacugcugggaugugcucacuucuccacccuccccgccagcccucugugccaugcccuucaggcucacgugcugggcgggacacucaccgucgccgugggcggaguucugguggcggcucugcuugucuucacgguggcccuccugguccggggccgcggggccggaaauggcagacugccccucaaacugucucaugugcaaucccagacaaacgggggaccuagccccaccccuaaggcucaucccccgcggucuccucccccuagaccccagcgcuccugcagccuugaccugggcgacgccggguguuacggcuaugcgcggagacucggaggcgcuugggcccgcagaucccacucuguucacgggggacugcugggcgccgggugccggggagugggcgggagcgcugaacgccuugaggaguccgucguguga

SEQ ID NO: 3198 - RNA, 3297 nt, Artificial Sequence
  EAW96782 variant
augcccccuagacagccgccccggcaagccggcgggggacugagccgcgaguucggcaagcuccugccugcucuuucccacucuccccucgggggacucggcagcggguccggaucuguggccccuggccagggcagagcgggggcuaugggaagccggacccccgaauccccucugcaugccguccagcuucgcuggggcccgagacggagacccccucugcucccccugcugcuccugcuucugccucccccgccucgcguugggggauuuaaccucgacgccgaggcucccgccgugcugucuggcccucccgggagcuucuuuggauucuccguggaauuuuaccggcccggcacagauggcgucagcgugcuuguuggggcuccuaaagccaauacgucucagccgggagugcugcaaggcggggcggucuaucucugccccuggggagccuccccuacccaguguacacccaucgaguucgacagcaagggcucucgccugcuggaauccagccucucuuccagcgagggggaggaaccuguggaguacaaaucccugcagugguuuggagcuaccguuagagcccacggcucuagcauucuugcuugcgcgccccuguauuccuggcggacagaaaaggagccgcucagcgauccugugggcaccuguuaccugucuacagacaacuucacccgcauccuugaguaugcccccugcagauccgauuuuagcugggccgcugggcagggauacugucaaggcggguucucugccgaauuuacgaaaaccggacgggucgugcugggcgggccuggcagcuauuucuggcagggacagauucucuccgcuacacaggagcaaaucgccgaaucuuacuaccccgaguaucugauuaaucuggugcagggccagcuccaaacccgccaggccagcuccaucuacgacgauagcuaucugggguacucugucgcuguuggagaauuuuccggcgacgauacagaggacuucguggcgggggugccuaagggaaaccuuaccuauggcuacgucacgauccugaaugggagcgauauuagaucucucuauaacuucuccggcgagcagauggccagcuacuuuggauacgcuguggccgccacagacguuaauggcgaugggcuggacgaccuucuggugggagcuccccuccugauggaucggaccccggacggcagaccucaggaagucgggcgcguguauguuuaccugcaacaucccgccggaaucgagcccacaccuacccucacccugacaggccacgaugaguucgggcgguuuggcuccucucuuacgccgcugggagaccucgaucaggacggcuauaacgauguggcgauuggggcucccuucggaggcgaaacccagcagggggucguguuugucuucccuggaggccccgggggccugggaagcaagccuucccaagugcugcagccccuuugggccgccucucauacaccugacuuuuucggcagcgcucucagagggggacgcgaucuggacggcaauggguaccccgaucugaucguuggauccuuuggcguggacaaagccgucguguaucggggcagaccgauuguuagcgcuucugccucccucaccaucuucccugcgauguuuaaccccgaggaacgcagcugcucucuggaggggaauccuguggccuguauuaaccuuuccuucugccugaaugcuagcggaaagcacgucgccgacucuaucggcuuuacaguggaacuccagcuggauuggcagaaacaaaaagggggagugcggagagcucuguuccuugccagccgccaggcgacccucacgcagacacugcugauccagaacggcgcccgggaggacuguagagaaaugaagauuuaccuccgcaaugaguccgaguuccgggauaagcugagccccauccacauugcucuuaacuuuucucuggacccgcaagccccuguugauucccaugggcucagacccgcucugcacuaucagagcaagucccggaucgaagacaaagcccagauucugcuugauugcggagaggacaacaucugugucccugaucuccaacuggaaguguucggcgagcagaaucauguguaccugggcgacaagaacgcccucaaucugaccuuucacgcucagaacgucggggaaggaggcgcguacgaggccgagcuucgcgugaccgcuccucccgaagccgaguauucugggcugguuagacaccccggaaauuucagcucccucucuugcgauuacuuugccgugaaccagagccggcugcuggucugcgaccuuggcaauccgaugaaagcuggggccucccucuggggaggccugagauucacagugccccaucugcgcgauaccaagaaaacaauccaauuugacuuccagauucucucuaagaaccugaauaacagccaguccgacguugugagcuuucggcuuucugucgaagcgcaggcucaagugacgcugaauggcguuuccaaaccugaggccgugcuguuccccgucagcgauuggcacccuagagaccagccccagaaggaagaggaucuggggccugccgugcaucacguguaugagcugaucaaccagggaccgucuuccauuagccaaggcguccuugaacugucuuguccccaggcucucgaggggcagcaacugcucuacguuacccgcgugacaggacugaauugcaccacaaaccauccuaucaaucccaagggccuugaacuggacccugaggggucccuccaccaccagcagaaaagagaagcccccagccgguccagcgcgucuagcggaccgcagauucugaaguguccugaggcugagugcuuucgccugagaugugaacuuggcccccugcaucaacaggagucccagucucuccagcugcacuuccgggugugggccaaaaccuuucuccaacgcgaacaucagcccuucagccugcagugcgaggccgucuauaaggcucuuaaaaugccuuacagaauccugccccggcagcucccucaaaaggaacgccagguggccacggcuguucaguggaccaaggccgagggcuccuauggggugccgcuguggaucauuauccuggcgauucuuuucggacugcuccugcucggccugcuuaucuacauucuguacaaacugggguuuuucaagagaucucuccccuauggaacagccauggagaaagcucagcugaagccucccgccaccagcgaugcuuga

SEQ ID NO: 3199 - RNA, 3597 nt, Artificial Sequence
  EAX08808 variant
auggccgagcaucccccucugcucgacaccacacagauccugagcuccgauauuucucuucugagcgcuccgaucguguccgccgacggcacgcaacaggucauucucguucaggugaaccccggggaagcguucaccaucagacgggaggauggacaguuucaaugcauuacaggcccugcucaggugcccaugaugucuccuaaugggagcgugcccccuaucuacgucccgcccggauaugccccucagguuaucgaagacaacggcgugcgcagagucgugguugugccccaggccccugaguuccaccccgggucccacaccguccugcaucggucuccgcacccuccccuuccuggauuuauucccgugcccacaaugaugccuccgcccccucgccauauguacagccccgugaccggcgcuggcgauaugacaacccaauauaugccucaguaccaguccagccaggucuauggggacguugaugcccacucuacgcacggaagauccaauuuccgggacgaacgcagcucuaagaccuacgagagacugcaaaagaagcucaaagaucggcagggcacacagaaggacaaaauguccucucccccgagcuccccucaaaagugucccagcccuaucaacgagcauaaugggcugauuaagggacagaucgcuggcgggauuaacaccggauccgccaaaaucaagucuggcaaaggcaaagggggaacacagguggauaccgaaauugaggaaaaagacgaggagacgaaggcguuugaagcccugcucagcaauaucgugaagcccgucgcuuccgauauccaggcccgcacagugguucugaccuggagcccucccucuucccuuauuaacggcgagacagacgaaagcucugugccggagcuguauggguacgaaguccucaucagcuccaccggaaaagacggcaaguacaaaucuguguauguuggggaggagaccaauauuacacugaacgaucuuaagccugcuauggacuaccacgccaaagugcaagcggaauauaauagcaucaagggaacgcccuccgaggccgaaauuuucaccacacugagcugcgagcccgauaucccuaacccgcccagaaucgcuaaucggaccaaaaacucucucacacugcaguggaaggccccuuccgacaauggcagcaagauucagaacuuuguccuggaaugggaugagggcaaagggaacggagaguucugucagugcuacaugggcucucaaaagcaguuuaaaaucaccaagcucucccccgcuaugggguguaaauuccgccugagcgccagaaaugacuauggaacguccggcuuuucugaagaggugcuuuacuauacaagcgggugcgccccuuccaugcccgcuucuccuguccugaccaaggcgggcauuaccuggcucagccugcagugguccaagcccagcggaacaccgucugaugaaggcaucuccuacauucuugagauggaagaggagaccagcggguacggauucaaaccuaaguaugacggcgaagaucuggccuacacagugaaaaaccuccggcgcucuacgaaguauaaauuuaagguuaucgcuuacaauuccgagggaaagagcaaccccucugaaguggucgaguucaccacauguccugacaaacccgggaucccggugaagccuagcguuaaaggcaagauucauucccacagcuucaaaaucaccugggaucccccuaaggacaaugggggcgccacaauuaacaaguauguggucgagauggccgaaggaucuaauggcaacaaaugggagaugaucuacuccggggcuaccagagaacaccugugcgaccggcugaaucccggauguuuuuauagacuccgcguguacugcauuagcgauggcgggcaguccgccgugucugagagccugcuuguucaaacgcccgcggucccuccgggacccugucugccuccccggcuccagggcagaccuaaggcuaaagaaauccagcugcgcugggggcccccucuuguggacggcggauccccgauuucuugcuacagcguggagaugucccccaucgagaaggaugaaccucgggaggucuaucagggcucugaaguggagugcaccguuagcucccugcuccccgggaaaacauacagcuucagacugcgcgccgccaacaagaugggauuuggcccuuucucugaaaaaugugacaucaccacagcucccgggccgccugaucaaugcaagccuccccaggugaccugucgguccgccacgugcgcucaggucaauugggaggugccccugagcaacggaacagacguuaccgaguauagacucgaauggggcgggguggagggcucuaugcaaauuuguuacugcggacccggccuguccuaugaaaucaaggggcuuagcccugccacaaccuacuauugucgcguccaggcgcugucugugguuggagccggcccguuuuccgagguggucgcuugcgugacacccccuagcgugcccgggauugucaccugucuccaggaaaucuccgaugacgagauugagaauccucauuacagccccucuacgugccuggccaucagcugggaaaaaccgugugaucacggauccgagauccuggcuuacucuauugacuucggcgauaagcagagccuuaccguuggcaaagugacauccuauaucauuaacaaucuccaaccugacaccacauaccggauccgcauucaggcccugaacucucugggggcgggacccuuuagccauaugaucaagcucaaaaccaagccucugcccccugaucccccgagacuugaaugcguggccuucucccaccagaaccugaagcucaaauggggcgaggggacgccuaagacacugucuaccgacagcauccaguaucaucugcaaauggaggacaaaaauggacgguuugucucccuuuacagaggccccugccacaccuauaaggugcagcggcucaacgaaagcacaucuuacaaauucuguauucaggcuugcaaugaggccggggaaggaccccugucccaggaguauaucuuuaccacaccuaagagcguuccggcugcccugaaggcccccaaaauugaaaaggugaacgaucacaucugugagauuacgugggagugccuccaaccuaugaaaggcgaccccgucaucuacucucuucaggugaugcugggcaaggauuccgaguucaaacagaucuacaaggggccugacagcuccuuucgcuauucuagccugcaacucaauugugaauacagauuccggguuugcgcuauuagacagugucaggauucccugggacaucaggaccuggugggccccuauagcaccacaguccuuuucaucucucaacgcaccgaaccuccggcguccacaaaccgggauaccguggagagcacgagaacccgcagagcccucucugacgaacagugcgcugccguuauucuggugcuguuugccuucuuuagcauccucauugcuuucaucauucaguacuuugucaucaaguga

SEQ ID NO: 3200 - RNA, 3429 nt, Artificial Sequence
  EAX08809 variant
augagcggccccgcccaggugccuaugauguccccgaacgggucugugcccccuaucuacguucccccuggauaugcuccccaagugauugaggacaauggcgugagacgggucgugguugugccucaggccccggaguuccaccccgggagccauaccguccugcaccgcuccccucaucccccucuccccggauuuaucccggugccuacaaugaugcccccuccucccagacacauguacucucccguuacgggcgcgggggauaugaccacacaguauaugccgcaguaccaaagcucccagguguauggagacgucgaugcucauucuacccacggccggagcaacuuccgcgacgaaagauccagcaagacauacgaacggcugcagaaaaagcucaaagaucgccagggcacccaaaaggacaaaaugucuuccccucccagcucuccccagaagugcccuucccccauuaaugagcacaacgggcugaucaagggacagauugccggcgggaucaauacaggaagcgccaaaaucaagucuggcaaagggaagggaggcacccagguggauacggaaauugaggagaaagacgaagagaccaaggcuuuugaagcccuccuguccaacaucgugaagccggucgcuagcgauauucaagccagaacaguugugcuuaccugguccccucccucuagccugaucaauggcgagacagacgaguccagcgugccugaacucuauggguacgagguccugauuucuuccaccggaaaagauggcaaguacaaaagcguguauguuggggaagagacgaacaucacacugaaugaccucaagcccgcgauggauuaccaugccaaagugcaggcugaauauaacucuauuaagggaaccccuagcgaggccgagaucuucacaacccuguccugugaacccgacaucccgaauccuccccggauugcuaaccgcaccaaaaauucucuuacacugcaguggaaggcccccagcgacaacggcuccaagauccaaaauuuuguccucgagugggaugaagggaaaggaaacggcgaguucugccaguguuacaugggcagccagaagcaguuuaaaauuacgaagcugucuccugcgauggggugcaaauucagacuuuccgcccggaacgacuauggaaccagcggcuuuucugaagaggugcuguacuauacauccgggugugcuccgagcaugcccgccuccccuguucucaccaaggcuggaaucacauggcugucucugcaauggagcaagcccuccggcaccccuucugaugaggggauuagcuacauccucgaaauggaggaagagacguccggcuacggauucaaacccaaguaugacggcgaagaucuggccuacacagugaaaaaucuucgcagaagcaccaaguauaaauuuaaggucaucgccuacaacucugaggggaaguccaauccuagcgagguggucgaguucaccacaugccccgacaaaccgggcauuccugugaagcccucuguuaaaggaaagauccacucccauagcuuuaaaauuaccugggauccucccaaggacaacgggggagcuacaaucaauaaguauguggucgaaauggcggaaggcucuaacgggaauaaaugggagaugauuuacagcggcgccacgcgggagcaccugugugaucgccucaacccgggaugcuucuauagacugcggguguacuguaucuccgacggcgggcagagcgcuguuucugaaucccuucuggugcagaccccugccgugcccccuggacccugccuucccccuagacugcagggccgcccgaaggccaaagagauccaacugcggugggggcccccucucgucgauggaggcagccccauuuccuguuacucuguggaaaugagcccuaucgagaaggacgaacccagagagguuuaucagggguccgaggucgaaugcacagugucuagccugcuuccuggcaaaaccuacuccuuccgccugcgggcugccaauaagaugggauuuggcccguucucugagaaaugcgacauuacaaccgcgcccgggccucccgaucaguguaagccuccccaggugacgugcagaagcgcuaccugugcccaagucaacugggaagugccgcucuccaauggaacagacguuaccgaguaucgccuggaauggggcgggguggagggaagcaugcagaucugcuacuguggcccugggcuuucuuaugagauuaagggccugucccccgccacaaccuacuauugccggguccaggcucucagcgugguuggagccggccccuuuucugaaguggucgcuugugugacgccucccuccguuccugggaucgugacaugccugcaggagauuagcgaugacgaaaucgagaacccgcacuacucucccuccaccugucuggccaucagcugggaaaaaccuugcgaucauggauccgagauucucgcguacagcaucgacuucggcgauaagcaaucucugacagucgggaaagugaccagcuauauuaucaauaaccuucagcccgacaccacauaccgcauuagaauccaggcccucaauucccugggagcuggcccuuuuucucacaugaucaagcugaaaacgaagccccugccgccugaucccccucggcuugaguguguggccuucagccaucaaaaccucaagcugaaauggggcgaagggacccccaagacacuguccaccgacucuauucaguaucaccuccagauggaggauaaaaacggaagauuugucagccuguaccgcggcccuugccauacauauaagguucagcggcuuaaugaauccaccucuuacaaauucugcauccaggcuuguaacgaggccggggagggaccccugagccaagaauauauuuuuacgacaccgaaguccgugccugcggcccucaaggcucccaaaaucgagaaggugaaugaccacauuugcgaaaucaccugggagugucugcagcccaugaaaggcgauccugucaucuacagccuucaggugaugcuggggaaggacucugaguucaaacaaauuuacaagggaccggacuccagcuuuagauauucuucccuccagcugaacugcgaauaccgguuccgcguuugugccaucagacagugccaggauagccugggccaccaagaccucgugggccccuauuccaccacaguccuguuuauuucucagcggaccgagccucccgcuagcacaaauagagauacgguggaauccacccgcacacggagagcccuuagcgacgagcagugugccgcuguuauccugguccucuucgcguucuuuucuauucugaucgccuucaucauucaauacuuugucaucaaguga

SEQ ID NO: 3201 - RNA, 1020 nt, Artificial Sequence
  EAW49214 variant
augcccccuagcaagccgcaucccccuguggucggcaaaguuacccaccacuccaucgagcuguacugggaccucgaaaagaaagccaagagacaggggccccaagagcagugguuccgguuuucuauugaagaggaagauccuaaaaugcauacauauggaaucauuuacacgggcuaugcuaccaagcacgugguggaggggcuggagccccgcacacuuuacagauuccggcugaaggucaccagcccuuccggagaaugcgaguauucuccgcucgugagcguuuccacaacccgcgaacccaucucuagcgagcaucugcacagagccguguccgucaacgacgaggaucuucuggugcggauucuccagggcgggcgcguuaaaguggacgucccuaauaaguuuggauucacagcgcugaugguggcugcccagaaaggcuacaccagacuggugaagauccucgucagcaacggcacggauguuaaucugaaaaacgggucuggaaaggacucccuuaugcuggccuguuaugcuggccaccucgauguggugaaguaccugcggcgccauggggccagcuggcaagcuagagaccuuggaggcugcaccgcccugcacugggcggccgaugggggacauuguucugucaucgaauggaugauuaaagacggcugcgagguggauguuguggacacaggcuccggguggacaccccucaugcgggucagcgcugugucuggaaaucagcgcguugccucccugcugaucgaugcuggcgccaacgugaaugucaaggacagaaacgggaaaaccccucucaugguggcgguccugaauaaccacgaggaacuugugcagcugcuccuggacaagggagccgaugcuagcguuaaaaaugaauuuggcaagggggugcuugagauggcccgggucuucgaccgccaguccgugguuucucugcucgaggaacggaaaaagaagcaaagacccaaaaagagcugugugugcuga

SEQ ID NO: 3202 - RNA, 3150 nt, Artificial Sequence
  BAF84259 variant
augggcagcagaacccccgaguccccucugcacgccgugcagcuccggugggggccgcgcagacggcccccucugcuuccccugcuccugcuucugcucccucccccuccgcgcgucggaggcuucaaccuggacgcugaagcccccgcgguucugucugggccucccgggagcuuuuucggcuuuuccguggaguucuacagaccugggacagauggagugucuguccucgugggcgcucccaaggccaauacgagccaaccgggcguucugcagggaggagccguguaucuuugcccuuggggcgcuucccccacccaguguacaccuaucgaauuugacucuaaagggagccggcugcucgaguccagccugucuuccagcgaaggagaggagcccgucgaauacaagucucuucagugguucggcgccaccgugcgcgcucauggguccagcauucuggccugcgcgccccucuauucuuggagaacagagaaagaaccucuguccgauccgguuggaaccuguuaccugagcacagacaacuuuacccggauccucgaguaugcccccugccgcuccgauuucucuugggcugccggccaaggcuacugucaagggggauuuagcgcugaguucacgaagaccggcagagugguccuugggggaccuggcuccuauuuuuggcaggggcagauucugagcgccacacaggaacagaucgcggagucuuacuaccccgaauaucugauuaaucucgugcagggacagcugcaaacccggcaggccuccagcaucuacgacgauucuuaucuuggcuacagcguggcugucggcgaguucuccggggacgauacagaagacuuuguugccggagugccuaaaggcaaccugaccuauggguacgugacgauccucaauggaucugauauucgcagccuguauaacuucuccggcgagcagauggcuagcuacuucgccuacgccgucgcugcgacagacgugaauggggauggccuggacgaccuccugguuggagccccgcuucugauggauagaaccccggacggccggccucaagagguggggcgcgucuauguguaccuccagcaccccgcuggaaucgaaucuacaccuacccugacccuuacaggccaugaugaguuugggagauucggauccagccugacgccccucggcgaccuggaucaggacggguauaacgauguugccauuggcgccccuuuuggaggcgaaacccagcaagggguggucuucguguuucccggaggccccgggggacugggcucuaagccuucccagguccuccagccccugugggcugccagccacacacccgacuucuuuggguccgcgcuucggggcggaagagaucuggacggcaauggguacccugaucucaucgugggaucuuucggcguugacaaggcuguggucuaucgcgggcggccgauugugagcgccuccgccucucugaccaucuuucccgcuauguucaacccugaggaaagaagcugcucccuggagggaaaucccguugccuguauuaaccuuagcuuuugccucaaugcuucuggcaaacauguggccgacuccaucggguucacagucgagcugcagcuggauuggcaaaagcagaaaggcggagugcgccgggcgcucuuucuggccagcagacaggcuacccuuacgcagacacugcucauccaaaacggcgcccgcgaagacugucgggagaugaagauuuaccugagaaaugaaucugaguuccgcgauaaacuguccccuauccacauugcucuuaacuucagccucgacccccaggccccuguggauucucacgggcugcggcccgcgcugcauuaucagagcaaguccagaaucgaagacaaggcccagauucuccugggaugcggcgaggauaacaucuguguuccggaccuucaacuggaggucuuuggggaacagaaucacguguaccucggagauaaaaacgcucugaaucugaccuuccaugcccagaacgugggcgagggcggggcuuacgaagccgagcuucgcgucaccgccccucccgaggcugaauauagcggacucgugcggcacccuggcaauuuuucuucccugagcugcgacuacuucgcgguuaaccaauccagacugcucgugugcgaucuggggaaucccaugaaggccggagcuucucuuuggggcgggcugcgguuuacagucccgcaccuccgcgacaccaaaaagacaauccaguucgauuuucagauucugagcaaaaaccugaauaacucccagucugacgugguuagcuucagacuuuccguggaggcccaagcccaggucacgcucaauggagugucuaagccugaagcuguucuguuucccgugagcgacuggcauccucgggaucagccccaggaggaagaggaccugggccccgccguccaccauguguaugagcucaucaaccaaggcccuuccagcauuucucagggggugcuggaacuuuccuguccgcaggcgcuggagggacagcaacuccuguacgucaccagaguuacaggccugaauugcaccacaaaccaccccaucaauccuaaagggcuugaacuggaucccgagggaagccuccaucaccagcagaagcgcgaagcuccuucucgguccagcgccucuuccggcccccaaauucugaaguguccugaggccgagugcuucagacuccgcugugaacuggggccgcuucaccagcaggagagccagucccugcaacuccauuuuagagugugggcuaaaaccuuccugcagcgggaacaccagcccuuuagccugcagugcgaggccguguauaaggcgcuuaaaaugccuuaccgcauccugcccagacaacucccucagaaggaacggcaggucgcuacggccgugcaguggaccaaagccgagggaucuuauggcguuccccuguggaucauuauccucgcuauucuguucggccuucugcuccuggggcugcuuaucuacauucuguacaagcucggauucuuuaagcgcagccugccguauggcacagccauggagaaagcucaacucaagccucccgccaccuccgacgcguga

SEQ ID NO: 3203 - RNA, 3150 nt, Artificial Sequence
  BAG35324 variant
augggcagcagaacccccgaguccccucugcacgccgugcagcuccggugggggccgcgcagacggcccccucugcuuccccugcuccugcuucugcucccucccccuccgcgcgucggaggcuucaaccuggacgcugaagcccccgcgguucugucugggccucccgggagcuuuuucggcuuuuccguggaguucuacagaccugggacagauggagugucuguccucgugggcgcucccaaggccaauacgagccaaccgggcguucugcaagggggagccguguaucuuugcccuuggggcgcuucccccacccaguguacaccuaucgaauuugacucuaaagggagccggcugcucgaguccagccugucuuccagcgaaggagaggagcccgucgaauacaagucucuucagugguucggcgccaccgugcgcgcucauggguccagcauucuggccugcgcgccccucuauucuuggagaacagagaaagaaccucuguccgauccgguuggaaccuguuaccugagcacagacaacuuuacccggauccucgaguaugcccccugccgcuccgauuucucuugggcugccggccagggcuacugucaagggggauuuagcgcugaguucacgaagaccggcagagugguccuugggggaccuggcuccuauuuuuggcaggggcagauucugagcgccacacaggaacagaucgcggagucuuacuaccccgaauaucugauuaaucucgugcagggacagcugcaaacccggcaggccuccagcaucuacgacgauucuuaucuuggcuacagcguggcugucggcgaguucuccggggacgauacagaagacuuuguugccggagugccuaaaggcaaccugaccuauggguacgugacgauccucaauggaucugauauucgcagccuguauaacuucuccggcgagcagauggcuagcuacuucggguacgccgucgccgcuacagacgugaauggcgauggacuggacgaccuccugguuggcgcgccccuucugauggauagaaccccggacgggcggccucaaggagugggccgcgucuauguguaccuccagcaccccgccgggaucgagccuacacccacccugacccuuacaggacaugaugaauuuggcagauucgggucuucccugacgccucucggcgaccuggaucaggacggauauaacgauguugcuauuggcgcccccuuugggggagagacccagcaaggcguggucuucguguuuccugggggaccgggcgggcugggcagcaagcucucucagguccugcagccccuuugggccgcuucccacacacccgacuucuuuggaagcgcccugcggggcgggagagaucucgacggaaauggcuacccugaucugaucgugggguccuucggaguugacaaggcgguggucuaucgcggccggccgauugugucugcuagcgccucccugaccaucuuucccgccauguucaacccugaagagagaucuugcagccuugaagggaaucccguugcuuguauuaaccucuccuuuugccugaaugccagcggcaaacauguggcugacucuaucggauucacagucgagcugcagcucgauuggcaaaagcagaaaggcggggugcgccgggcccuguuucuugcguccagacaggccacccugacgcagacacuccugauccaaaacggagcucgcgaggacugucgggaaaugaagauuuaccugagaaaugagagcgaguuccgcgauaaacuuucuccuauccacauugcccucaacuucucccuggacccccaggcuccuguggauagccacggccugcggcccgcccuccauuaucagucuaagagcagaaucgaagacaaggcgcagauucugcuugauugcggggaagacaacaucuguguuccggaucugcaacucgaggucuuuggagagcagaaucacguguaccugggcgacaaaaacgcccugaaucuuaccuuccaugcucagaacgugggcgaagggggagccuacgaggcugaacuccgcgucaccgccccucccgaggccgaguauuccggccuggugcggcacccugggaauuuuagcucucuguccugcgauuacuucgcuguuaaccaaagcagacuccuggugugcgaccuuggaaaucccaugaaggcgggcgccucccuguggggaggacuccgguuuacagucccgcaucugcgcgauaccaaaaagacaauccaguucgacuuucagauucugucuaaaaaccuuaauaacagccaguccgacgugguuucuuucagacucagcguggaagcucaagcccaggucacgcugaauggcguguccaagccugaggccguucuguuucccgugucugauuggcacccucgggaccagccccagaaagaagaggaucucggccccgcuguccaccauguguaugaacugaucaaccaagggccuagcuccauuagccagggagugcuugagcugucuuguccgcaggcccucgagggccagcaacugcuguacgucaccagaguuacagggcuuaauugcaccacaaaccaccccaucaauccuaagggacuggaacucgaccccgagggcucccugcaucaccagcagaagcgcgaagcgccuagccggucuuccgcuagcucugggccccaaauucucaaauguccugaggccgaaugcuucagacugcgcugugagcuuggaccgcugcaccagcaggagucccagagccuccaacugcauuuuagagugugggccaagaccuuccugcagcgggaacaccagcccuuuucccuucagugcgaggcuguguauaaagcccugaagaugccuuaccgcauccuccccagacaacugccucagaaagaacggcaggucgcgacggcugugcaguggaccaaggccgagggcagcuauggcguuccccucuggaucauuauccuggccauucuuuucgggcugcuccugcugggacuucugaucuacauucucuacaagcugggcuucuuuaaacgcucucucccguaugggacagcuauggaaaaggcccaacugaaaccucccgcuaccagcgaugccuga

SEQ ID NO: 3204 - RNA, 1401 nt, Artificial Sequence
  BAG54537 variant
augcugagccucagacagcggaugaugcacgcccgcuucagaaacccccugucccggcaaccugcucgcccgucuuacagacagggcuauaaugggcggcccaacguggagggaaagguccuuccuggcagcaaugggaaacccaacggacagcgcaucauuaauggcccucaggggaccaaguggguuguggaccuggauagaggacucgugcugaacgccgaaggccgguaccuucaagacucccauggcaauccccugcgcaucaaacucgggggagauggcagaacaauugucgaccuggaggggacgccugugguuucuccggauggacugccccucuuuggccaggggcggcacggaaccccucuggcgaacgcucaggacaagcccauccuuagccugggcggcaaaccucucguggggcuggaagucauuaagaagacaacccaucccccgacaaccacaaugcagccuaccacgaccacaacaccccuuccuaccaccacgacaccccgccccaccacagccaccaccagacggacaacgacccgcagaccuacaaccacagugcggaccacgacaagaaccaccacaaccacaacgccgaaacccaccacaccuauccccacaugcccucccggaacccuggagcgccacgaugacgauggcaaucucaucauguccucuaacgggauuccggaauguuaugccgaggaggacgaguucagcggacuggaaaccgauacggcuguuccuaccgaagaggccuacgugaucuaugacgaggauuacgaauuugagacaucccggcccccuaccacaaccgaacccagcacgacagcuaccacaccuagagucauucccgaggaaggcgccaucucuuccuucccggaggaggaauuugaccuggcggggcgcaagcgguucguggccccuuaugugaccuaccucaauaaagaccccagcgcucccugcucucugaccgaugcccuugaccauuuucaagucgauucccuggacgagauuaucccuaacgaucucaagaaaagcgaccugccgccccagcacgcuccuagaaauauuacaguuguggccguggaaggaugucacucuuucgucaucguggauugggacaaggcgacgcccggcgauguugugaccggcuaccuugucuauuccgccagcuacgaggacuuuauccgcaacaagugguccacacaggcuucuagcgugacccaucugccuauugaaaaucucaaacccaacacacgguauuacuucaagguucaggcccaaaacccucacggguauggacccaucuccccgagcgugucuuuugucaccgaguccgauaauccucugcugguggucagacccccuggcggggagcccauuuga

SEQ ID NO: 3205 - RNA, 471 nt, Artificial Sequence
  BAG58437 variant
auggaggaacagagaaacgaggaaauccagagcuucauuuacucccugaagcaaaugcuccugaauguggaggccaacucugcuaaaguccaggaagaccuugaggccgaguuucagagccuguucucccuccuggaagaacuuaaggaaggcaugcugaugaaaaucaagcaagaucgggcgucucgcaccuaugagcuccagaaucagcuggcugccugcacaagagcccuggagagcuccgaggagcuccuggaaacggcuaaccagacccuucaagccauggacucugaggauuuuccccaggcugccaaacagauuaaggacgggguuacaauggcgccugccuuccggcugagccucaaggcuaaaguguccgauaauaugagccaccugaugguggacuuugcccaggaacgccaaaugcuucaggcucugaaguuccucccgggagagagaggcacccauuga

SEQ ID NO: 3206 - RNA, 921 nt, Artificial Sequence
  BAH14721 variant
augaucuucgaggaacacggcuuuagacggaccacacccccuacgaccgccacaccgauucgccauagaccccggccuuaucccccuaacguggggcaggaggcucugagccaaaccacaaucuccugggcccccuuccaggacaccucugaauacauuaucagcugccacccugucggaacagaugaggaaccgcuccaguuucgcguucccggcaccuccacgucugcgacccugacagggcuuaccagaggagcuacauacaauauuaucguggaggcccugaaggaccagcaacggcauaaagugcgcgaggaagucgugaccguuggcaacagcgugaaugaggggcucaaccagccuacggaugacuccuguuucgaucccuauacagucucucacuacgccgugggagacgaaugggagagaaugagcgaguccggcuuuaagcugcuuugccagugucugggcuucgggagcggacauuuucggugcgauucuucccgcuggugucacgacaauggcguuaacuauaaaaucggggaaaagugggauagacagggagagaauggccaaaugaugagcugcaccugucucgggaacggaaaaggcgaguucaagugcgacccucacgaagcuacauguuacgaugacggcaagaccuaucaugugggggaacaguggcagaaagaguaccugggagccauuugcucuuguaccugcuuuggcgggcagcggggauggcgcugcgauaauuguagacggcccggcggggagccguccccugaaggaacaacgggccaaagcuacaaccaguauucucagcgcuaccaccaaagaaccaauacaaacgucaauugccccaucgaguguuucaugccucuggacgugcaggcugaccgggaagauuccagagaguga

SEQ ID NO: 3207 - RNA, 1920 nt, Artificial Sequence
  BAG61560 variant
auggagaagauccuguucuaccucuuucugauuggcaucgccgugaaagcucagauuugccccaagagaugugucugccaaauccuuagcccuaaccuggccacccucugugcgaaaaaggggcugcuuuucguuccgcccaauauugaccggcgcacaguggaacugagacucgcugauaacuuugugacgaauaucaaacggaaggacuucgccaacaugaccucccuggucgaucugacacucucucgcaauaccaucagcuuuauuacaccucacgccuucgcugaccugagaaaccuucggucccugcaucucaauucuaaccgccugaccaagaucacaaaugauauguuuagcggacuuuccaaccugcaccaucucauucugaauaacaaucagcugacccucaucucuagcacggccuucgacgauguguuugcucuggaggaacuugaccuguccuauaacaaucucgagaccauucccugggaugccguugagaaaauggugagccugcacacacuuucucuggaccauaacaugaucgauaacauuccuaagggcaccuucucccaccuccacaaaaugacaagacuggacgucaccagcaauaagcugcagaaacugcccccugauccgcuguuucagcgggcgcaagugcuugccacgucugggaucaucucccccagcacauucgcucugucuuuuggaggcaacccucuccauugcaauugugaacugcuuuggcugcgcagacucucccgggaguacgaccuggaaaccugcgccagcccuccccugcucacagggcgcuauuucugguccauucccgaggaagaguuccugugugagccgccucuuaucaccagacacacccaugaaaugcggguucuggagggacagcgcgcuacacucagaugcaaggcccggggcgaccccgaaccugcgauucacuggaucucucccgagggcaagcugauuagcaacgccacgagaucccugguguacgauaaugggacccuugacauccucaucacaaccgucaaagauacaggagcuuuuaccuguauugccagcaaccccgcuggcgaagccacgcagaucguggaccugcacauuaucaagcugccucaucuccucaauucuacaaaccacauucaugagccggaucccggguccagcgacaucucuaccagcaccaaauccggaucuaauacaagcuccagcaacgauggcaucaccucucuuacagccacgcgcguggucgggugcauucaguucaccacagagcaagacuauguucggugucacuuuaugcagucccaguuccugggaggcaccaugaucauuaucauuggcgggaucauuguggcuagcgugcucgucuuuaucaucauucugaugaucagauacaaggugugcaauaacaauggacagcauaaaguuacaaaggugucuaacgucuauucccaaaccaauggcgcgcagauucaggggugcagcgugacgcugccucaauccguuucuaaacaggccgugggacacgaagagaacgcucaguguugcaaggccaccagcgauaacgucauccaguccucugaaacauguagcucccaagacagcgccaccacaaccucugcccuucccccuuccuggacgagcucuacauccgugagccagaagcagaaacgcaagaccggcacaaaacccucuaccgagccgcagaaugaagcugucaccaacguggagagccaaaauacaaaccggaauaacuccacggcgcuccagcuggcuagcagaccucccgauucuguuaccgaggggccuacauccaagcgcgcccacauuaaacccaaugcccugcucaccaacguggaccagaucguccaggaaacacaacggcuggagcuuaucuga

SEQ ID NO: 3208 - RNA, 1014 nt, Artificial Sequence
  BAG61984 variant
augaucuucgaggaacacggcuuuagacggaccacacccccuacgaccgccacaccgauucgccauagaccccggccuuaucccccuaacgugggggaggaaauccagauuggacacaucccccgcgaggacgucgauuaccaucuguacccucacggcccggggcucaaucccaacgcuagcaccggacaagaagcccugucccagacaaccauuucuugggcgccuuuccaggacacaagcgaguauaucaucuccugccaucccguuggcaccgaugaggaaccucuucaguuuagagugcccgggacgucuaccagcgcuacacugaccggacucacacggggcgccaccuacaauauuaucguggaggcccugaaggaccaacagcgccacaaagucagagaagaggugguuacggugggcaacuccgucaaugaggggcuuaaccagccgacagaugacucuuguuucgauccuuauaccgugagccacuacgcuguuggagacgaaugggagcggauguccgaaagcggcuuuaagcugcucugccagugucugggguucggaucuggccauuuucgcugcgauuccagcagauggugucacgacaauggggugaacuauaaaauuggagagaagugggaucggcaaggcgaaaauggccagaugaugucuugcacaugucuggggaacggaaaaggcgaguucaagugcgacccccaugaggccaccuguuacgaugacgggaagaccuaccacgucggagaacaguggcagaaagaguaucucggcgcuaucugcuccuguacaugcuuugggggacaacgcggcuggagaugcgacaauugucggcgcccuggcggggaacccagccccgagggaacgaccggccagucuuacaaccaguauucccaaagauaccaccagcggacaaauaccaacgugaauugcccuauugaauguuucaugccgcuggaugugcaggccgacagagaggauagccgcgaguga

SEQ ID NO: 3209 - RNA, 3045 nt, Artificial Sequence
  BAG62013 variant
augagagugaccugggcucccccuccgagcaucgaccugacaaacuuccucguccgguacucccccguuaagaaugaggaagauguggccgagcugucuauuagcccuuccgacaacgccgugguccuuacgaaucugcuccccggcaccgaauaugugguuucugugagcuccgucuacgagcagcacgaaucuacaccucugcgcgggagacagaaaaccggacuugauagccccacaggcaucgacuuuuccgauauuaccgggaacagcuucacagugcauuggaucgcgccucgggcuaccauuacgggauaucgcaucagacaccauccggagcacuuuucuggccggccccgcgaggacagaguuccucauucccggaauagcaucacccugacaaaccucacccccgggacagaauacguggucucuauuguggcccugaauggacgcgaggaauccccucugcucaucggccaacagagcaccgugucugauguccccagagaccuggagguuguggccgcuacgccgacaucccuucugauuagcugggaugccccugcugugaccguccgguauuaccgcaucacauauggcgagaccgggggaaacucccccgugcaggaguucaccguuccuggcucuaagagcacagccacgauuuccgggcucaaacccggaguggacuacaccaucacagucuacgcggugaccggcagaggggauagccccgccucuuccaagccuauuagcaucaauuaucggacagaaaucgacaaaccgucucaaaugcagguuaccgaugugcaggacaacagcauuuccgucaaguggcugcccucuagcuccccugugacgggauaccgcgucacaaccacccccaagaauggcccuggccccacaaaaaccaagacagcugggccggaccagacggaaaugaccaucgagggacuucaaccuacaguggaauauguugugagcgucuacgcccagaaccccucuggcgagucccagccucuggugcagaccgcuguuacaaccauucccgccccuacggaucucaaauuuacccaagugacacccaccagccugucugcgcaguggacaccgccuaauguccagcugaccggguauagagugcgggugacgcccaaggagaaaacaggacccaugaaggaaaucaaccucgccccugacuccagcuccguugucgugucuggccugaugguggcuaccaaguacgaggucagcguguaugcccuuaaagauacacugaccuccagaccggcucaagggguugugaccacacucgaaaaugucucucccccucgccgggccagagugacggacgccaccgagacaaccauuacaaucagcuggcgcaccaagacggaaacaaucaccggauuccagguugaugcugugcccgcgaacggccagaccccuauucagcggacaaucaaacccgacgucagauccuacaccauuacaggccugcaaccugggacggauuacaagaucuaucuuuacacccugaacgacaaugcccgcagcucucccgugguuauugaugcuuccacagccaucgacgccccgagcaaccuccgguuucuggcuaccacaccuaauucucugcucguguccuggcagcccccuagagcccgcaucaccggauauauuaucaaauacgagaagcccggcagcccgccucgggaggucgugcccagaccucgccccggggugacggaagcgaccauuacaggacuggagcccggcaccgaauauacaaucuacgucauugcucuuaaaaacaaucagaagucugagccucugaucgggcggaagaaaaccgaugaacucccgcagcugguuacacuuccccacccuaaccugcacggccccgagauucucgacgugccuagcaccgugcaaaagacgcccuucgucacacauccuggauaugacaccggcaaugggauccagcugccgggaaccuccggccagcagcccagcguggggcaacagaugaucuuugaggaacacggauucagacggacaaccccucccacgacagccaccccuauucgccauagaccccggccguacccucccaacguuggcgaggaaauccagauugggcacauccccagagaggauguggacuaccaccuguauccucauggccccggacucaauccuaacgccucuacaggccaggaggcucugucccaaaccacaauuagcugggccccguuucaggauaccuccgaauacaucaucucuugccaccccgucgggacggacgaggaaccucuucaguuccgcgugcccggaaccagcacauccgcuacccugacaggccucaccagaggggccacguauaauauuaucguugaggcgcugaaagaucaacagcggcauaaggugcgcgaagaggucgugacaguuggaaacucugugaaugagggccugaaccagccuaccgacgauagcuguuuugaccccuacacagucucccacuaugccgugggggaugaaugggagagaaugucugaaagcggcuucaaacuucucugccagugucugggauucggcuccgggcauuuucggugcgacagcucucgcuggugucacgauaauggagugaacuacaagauuggcgagaagugggacagacaaggggaaaacggacagaugauguccugcaccugucugggcaaugggaaaggcgaguucaagugcgauccgcacgaggcuaccuguuaugacgacggaaaaacauaccaugucggcgaacaguggcagaaggaguaccucggggccaucugcagcuguacgugcuuuggaggccaacggggguggcgcugcgauaacuguagacggccuggaggcgaacccucuccugagggcaccacagggcaguccuauaaucaguacagccagcgcuaucaccaaagaaccaacacaaauguuaacugccccauugaauguuucaugccucuggacgugcaggcugaucgggaggacucucgcgaguga

SEQ ID NO: 3210 - RNA, 2685 nt, Artificial Sequence
  BAG62178 variant
augagagugaccugggcucccccuccgagcaucgaccugacaaacuuccucguccgguacucccccguuaagaaugaggaagauguggccgagcugucuauuagcccuuccgacaacgccgugguccuuacgaaucugcuccccggcaccgaauaugugguuucugugagcuccgucuacgagcagcacgaaucuacaccucugcgcgggagacagaaaaccggacuugauagccccacaggcaucgacuuuuccgauauuaccgcgaacagcuucacagugcauuggaucgcuccucgggccaccauuacgggguaucgcaucagacaccauccggagcacuuuucuggacggccccgcgaggacagaguuccucauucccggaauagcaucacccugacaaaccucacccccggcacagaauacguggucucuauuguggcccugaaugggcgcgaggaauccccucugcucaucggacaacagagcaccgugucugauguccccagagaccuggagguuguggcugccacgccgacaucccuucugauuagcugggaugcuccugccgugaccguccgguauuaccgcaucacauauggcgagaccggcgggaacucccccgugcaggaguucaccguuccuggaucuaagagcacagcgacgauuuccggccucaaacccgggguggacuacaccaucacagucuacgccgugaccggaagaggcgauagccccgcuucuuccaagccuauuagcaucaauuaucggacagaaaucgacaaaccgucucaaaugcagguuaccgaugugcaggacaacagcauuuccgucaaguggcugcccucuagcuccccugugacgggguaccgcgucacaaccacccccaagaauggaccuggccccacaaaaaccaagacagccggcccggaccagacggaaaugaccaucgaggggcuucacccuacaguggaauauguugugagcgucuacgcucaaaaccccucuggagagucccagccucuggugcagaccgccguuacaaccauucccgcgccuacggaucucaaauuuacccaggugacacccaccagccugucugcccaauggacaccgccuaauguccagcugaccggcuauagagugcgggugacgcccaaggagaaaacagggcccaugaaggaaaucaaccucgcuccugacuccagcuccguugucgugucuggacugaugguggccaccaaguacgaggucagcguguaugcucuuaaagauacacugaccuccagaccggcccagggcguugugaccacacucgaaaaugucucucccccucgccgggccagagugacggacgcuaccgagacaaccauuacaaucagcuggcgcaccaagacggaaacaaucaccggguuccaaguugaugcggugcccgccaacggacagaccccuauucagcggacaaucaaacccgacgucagauccuacaccauuacaggccugcagccuggcacggauuacaagaucuaucuuuacacccugaacgacaaugcucgcagcucucccgugguuauugaugccuccacagccaucgacgcuccgagcaaccuccgguuucuggccaccacaccuaauucucugcucguguccuggcaacccccuagagcgcgcaucaccggguauauuaucaaauacgagaagcccggaagcccgccucgggaggucgugcccagaccucgccccggcgugacggaagcuaccauuacagggcuggagcccggaaccgaauauacaaucuacgucauugcccuuaaaaacaaucagaagucugagccucugaucggccggaagaaaaccgggcaggaagcccucagccagacaaccauuuccugggcuccguuccaagauacgagcgaguauaucaucucuugccaccccguuggcacagacgaggaaccucugcaguuuagagugcccggaaccuccaccagcgccacacuuaccggccugacgcgcggggcuacauacaacauuaucguggaggcccucaaggaccagcagcggcauaaagucagagaagaggugauuaccguuggaaauuccgugaacgagggccugaaucaaccuacagaugacucuuguuucgaucccuacaccgucagccacuaugcggugggggacgaaugggagcggauguccgaaucuggauuuaagcugcucugccagugucugggcuucgggagcggccauuuuagaugcgauuccucucgcuggugucacgacaacggaguuaauuacaaaaucggcgagaagugggaucggcagggggaaaacggacagaugaugagcugcacaugucuuggcaaugggaagggagaguucaaaugcgacccucacgaggccaccuguuaugaugacggcaagacguaccaugugggggaacaauggcagaaagaguaucugggcgcuauuugcuccuguaccugcuucggaggccagagaggguggcgcugcgauaacuguagacggccgggaggcgaacccagcccugaggggacaaccggacaaucuuacaaucaguauucccagcgcuaccaccagagaacaaacaccaacgucaauugccccaucgaauguuuuaugccucucgacgugcaagccgaucgggaggacagccgcgaguga

SEQ ID NO: 3211 - RNA, 1152 nt, Artificial Sequence
  BAH12351 variant
auggccagcgcuuucagacugucccucaagcccaaagugucugacaacaugacccaccugauggucgauuuuagccaggagcggcaaaugcuucagacacugaaguuccucccuguuccgaaagcccccgaaaucgacccuguggagugccugguggcggauaauuccgucacgguggcuuggcgcaugcccgaagaggacaacaagauugaucauuuuauccuugaacacagaaaaaccaauuucgacggccugccucggguuaaggaugagcgcuguugggagauuaucgacaacauuaaggggacagaauacacccucucuggacugaaauuugauagcaaguauaugaauuucagagugcgggccugcaacaaagccgucgcuggcgaguacuccgaccccgugacacuggaaaccaaggcccucaauuuuaaccuggauaauucuagcucccaucuuaaccugaaaguugaggacacauguguggagugggauccuaccgggggaaagggccaggaaagcaagaucaaagggaaggagaauaaaggaucuguccacgugacgucccucaagaaacauaccagcggcacaccgucucccaagcgcaccuccgugggcagcagaccucccgcuguccgggggucucgcgacagauucacaggagaauccuauaccguucugggcgacacggccaucgagagcgggcagcacuacugggaagugaaagcgcaaaaggauugcaaguccuauucugugggagucgccuacaaaacacuuggcaaguuugaccagcuggggaaaaccaacacaagcugguguauucacgugaauaacuggcuccagaauaccuucgcugccaagcauaacaacaaaguuaaggcucuggaugugaccgucccugagaagaucggaguguuuugcgacuucgauggcggccagcuguccuuuuaugacgccaauagcaaacaacuccuguacucuuucaagacaaaauucacgcagcccguucuuccgggguuuauggugugguguggaggccugucccucagcaccgggaugcaggucccuucugcggugcggacacugcaaaagagcgagaacggaaugaccggcuccgccucuagccuuaauaacgucgugacacaguga

SEQ ID NO: 3212 - RNA, 441 nt, Artificial Sequence
  BAH14175 variant
augcccccuagcaagccgcaucccccuguggucggcaaaguuacccaccacuccaucgagcuguacugggaccucgaaaagaaagccaagagacaggggccccaagagcagugguuccgguuuucuauugaagaggaagauccuaaaaugcauacauauggaaucauuuacacgggcuaugcuaccaagcacgugguggaggggcuggagccccgcacacuuuacagauuccggcugaaggucaccagcccuuccggagaaugcgaguauucuccgcucgugagcguuuccacaaccucugaauacagcgaccgcccccauuccccucugagcagaucuauggagaugacauccaaccuugagaaaaucuuuugucugagcuucggccucacccggucucgcaaugauacgauuuuuaagcacugcaacaauaucuguuga

SEQ ID NO: 3213 - RNA, 2055 nt, Artificial Sequence
  EAX08810 variant
auggccgagcaucccccucugcucgacaccacacagauccugagcuccgauauuucucuucugagcgcuccgaucguguccgccgacggcacgcaacaggucauucucguucaggugaaccccggggaagcguucaccaucagacgggaggauggacaguuucaaugcauuacaggcccugcucaggugcccaugaugucuccuaaugggagcgugcccccuaucuacgucccgcccggauaugccccucagguuaucgaagacaacggcgugcgcagagucgugguugugccccaggccccugaguuccaccccgggucccacaccguccugcaucggucuccgcacccuccccuuccuggauuuauucccgugcccacaaugaugccuccgcccccucgccauauguacagccccgugaccggcgcuggcgauaugacaacccaauauaugccucaguaccaguccagccaggucuauggggacguugaugcccacucuacgcacggaagauccaauuuccgggacgaacgcagcucuaagaccuacgagagacugcaaaagaagcucaaagaucggcagggcacacagaaggacaaaauguccucucccccgagcuccccucaaaagugucccagcccuaucaacgagcauaaugggcugauuaagggacagaucgcuggcgggauuaacaccggauccgccaaaaucaagucuggcaaaggcaaagggggaacacagguggauaccgaaauugaggaaaaagacgaggagacgaaggcguuugaagcccugcucagcaauaucgugaagcccgucgcuuccgauauccaggcccgcacagugguucugaccuggagcccucccucuucccuuauuaacggcgagacagacgaaagcucugugccggagcuguauggguacgaaguccucaucagcuccaccggaaaagacggcaaguacaaaucuguguauguuggggaggagaccaauauuacacugaacgaucuuaagccugcuauggacuaccacgccaaagugcaagcggaauauaauagcaucaagggaacgcccuccgaggccgaaauuuucaccacacugagcugcgagcccgauaucccuaacccgcccagaaucgcuaaucggaccaaaaacucucucacacugcaguggaaggccccuuccgacaauggcagcaagauucagaacuuuguccuggaaugggaugagggcaaagggaacggagaguucugucagugcuacaugggcucucaaaagcaguuuaaaaucaccaagcucucccccgcuaugggguguaaauuccgccugagcgccagaaaugacuauggaacguccggcuuuucugaagaggugcuuuacuauacaagcgggugcgccccuuccaugcccgcuucuccuguccugaccaaggcgggcauuaccuggcucagccugcagugguccaagcccagcggaacaccgucugaugaaggcaucuccuacauucuugagauggaagaggagaccagcggguacggauucaaaccuaaguaugacggcgaagaucuggccuacacagugaaaaaccuccggcgcucuacgaaguauaaauuuaagguuaucgcuuacaauuccgagggaaagagcaaccccucugaaguggucgaguucaccacauguccugacaaacccgggaucccggugaagccuagcguuaaaggcaagauucauucccacagcuucaaaaucaccugggaucccccuaaggacaaugggggcgccacaauuaacaaguauguggucgagauggccgaaggaucuaauggcaacaaaugggagaugaucuacuccggggcuaccagagaacaccugugcgaccggcugaaucccggauguuuuuauagacuccgcguguacugcauuagcgauggcgggcaguccgccgugucugagagccugcuuguucaaacgcccgcggucccuccgggacccugucugccuccccggcuccagggcagaccuaaggcuaaagaaauccagacccccuccggguga

SEQ ID NO: 3214 - RNA, 492 nt, Artificial Sequence
  AAG35520 variant
augagcgaguccggcuucaagcugcucugccagugucugggguuuggaucuggccacuucagaugcgacagcucccgguggugucaugauaacggggugaauuacaaaaucggagaaaagugggaccgccaaggcgagaacgggcagaugaugucuugcaccugucuuggaaauggcaaaggcgaauuuaagugcgauccccacgaggccacauguuaugacgaugggaaaacguaccaugucggagaacaguggcagaaggaguaucugggcgcuauuugcagcuguaccugcuucgggggacaaagaggcuggcggugugacaacugccgcagaccugggggagagccgucccccgaaggcacaaccggccagucuuacaaucaguauagccagcgguaccaccaacgcacaaacaccaauguuaacugcccuaucgaguguuuuaugccccucgaugugcaggccgacagagaagauucccgggaguga

SEQ ID NO: 3215 - RNA, 1143 nt, Artificial Sequence
  AAA52471 variant
augauguucagcggcuuuaacgccgacuacgaggcuuccucuagcagaugcuccucugccagccccgcgggggauucccugucuuauuaccacagcccugcugacuccuucagcucuaugggauccccggugaaugcccaggauuuuuguaccgaccucgccgucagcucugcuaacuucauccccacaguuacggccauuuccaccagcccugaucugcaauggcuugugcagcccgcucuggugucuuccgucgccccuagccagacacgggcgccccauccuuuuggcgugccggcccccuccgcuggggccuauucucgcgcuggaguugugaagaccaugacaggcgggagagcccagagcaucggacggcgcggcaaagucgaacaacucuccccugaggaagaggaaaagagacggauucgcagagagcggaauaaaauggcggccgcuaagugccgcaacagacggcgcgagcugaccgacacacuucaggccgaaaccgaucagcuggaggacgagaaaagcgcucuccagacggaaaucgccaaucugcugaaggagaaggaaaaacucgaguucauucuggccgcucacagacccgcguguaagaucccugaugaccuuggcuuucccgaagagaugucuguggccucccuggaucucaccgggggacugccggaaguugcuacaccugagagcgaggaagccuucacccuuccccugcucaacgacccugagcccaaacccucuguggaaccugucaagagcaucuccucuauggagcugaaaacagaaccguuugaugacuuccuguuucccgccagcucccggccuagcggcucugagaccgcucgcuccgugcccgacauggaucucagcgggucuuucuacgccgcggacugggagccucugcauuccggaagccuuggcauggggcccauggcuacggaacuggagccgcucugcacaccuguggucaccuguacacccuccugcaccgccuauaccucuagcuuuguuuucacauacccugaagccgauuccuuccccucuugugcugccgcucacagaaagggaagcuccagcaaugagccuucuuccgacagccugucuucccccacgcuucuggcccucuga

SEQ ID NO: 3216 - RNA, 1296 nt, Artificial Sequence
  AAG53607 variant
augcccaacccuagaccgggcaagcccagcgccccuucccuggcucucgggcccucuccuggagccagccccuccuggcgggcggcuccuaaagccucugaccugcuuggcgcccgcgggccgggaggcaccuuccaggggagagaucugcggggaggcgcucacgccagcuccucuagccucaaucccaugccucccucccaacugcagcuuccuacacugccccucgugauggucgcuccgagcggcgcccgccuggggccucugccccaucuccaggcgcugcuucaggacagaccucacuuuaugcaucaacugucuacgguugaugcccacgcucggacccccgugcuccaggugcauccccuggaauccccugccaugaucagccuuacaccgcccaccacagcuaccggagucuucucucugaaggcccgcccuggccugcccccugggauuaacguggcgucccuggaauggguuagcagagagcccgcccugcucugcacauuuccgaauccuucugcuccccggaaagacuccacccugagcgccgugccucaguccucuuacccccuucuggcuaacggagucuguaaguggccuggcugcgaaaaaguguucgaggaacccgaggauuuucucaagcacugucaggccgaccaccuccuugaugagaaggggcgcgcccaaugccugcuccagagagaaaugguucagagccuggagcagcaacuggugcucgaaaaagagaagcuguccgcuaugcaggcgcaucuugccggaaaaauggcucugacgaaggccagcucugucgccuccagcgacaaaggcucuuguugcaucguggcugccggcagccaggggccgguggucccugcgugguccggaccccgggaggcucccgauucucucuucgccguucgcagacaccuguggggcagccauggaaauuccaccuuuccugaguuccuucacaacauggacuauuuuaaguuccacaauaugcggccgcccuuuacauacgccacccugauucgcugggcuauccucgaagccccugaaaagcaaagaacacugaacgagauuuaucauugguucacccggauguuugcuuucuucagaaaucaccccgccacguggaaaaacgcgauccgccauaaucugagccuccacaaguguuuugugcggguggaaucugagaaaggggccgucuggacaguggaugagcuggaguucagaaagaaacgcucccagcggccuagcagaugcucuaaccccaccccuggccccuga

SEQ ID NO: 3217 - RNA, 1098 nt, Artificial Sequence
  AAA52639 variant
auguggcugagaagccaccggcagcucugccuggccuuccuucugguguguguccucuccguuaucuuuuuccugcauauucaccaagacucuuuuccccauggccuugggcugagcauccucugcccugaucgcagacuggugaccccgcccguggcuauuuucugucugccuggaacagccaugggccccaacgcguccucuagcugcccucagcaccccgcuucccucucugggacguggaccgucuacccuaauggacgguuuggcaaccagauggggcaguaugccacacugcuugcccuggcucaacucaauggacgcagagccuucauccugccggcuaugcaugccgcgcuugcccccguguuucggauuacccugccuguucucgcucccgagguggacagccgcacaccuuggagagaacugcagcugcacgauuggauguccgaggaauacgccgaccuccgggaucccuuccugaaacuuagcggcuuuccguguucuuggaccuucuuucaccaucugcgcgagcagaucagacgggaguucacacuccacgaccaucugcgcgaagaggcucaguccguccuuggccaacugagacucgggcggaccggagaucgcccuagaacguuugugggcguucacgugcggagaggggacuaucugcaggucaugccccagcgcuggaagggaguggugggcgauagcgccuaccugcggcaggcgauggacugguucagagcccgccacgaagcuccugucuucguugugaccucuaacgggauggaguggugcaaggaaaauaucgauacaucccaaggagacgugaccuuugccggcgauggccaggaggcuacacccuggaaagacuucgcccuccugacccaguguaaccauacgauuaugacaaucgggaccuuuggauucugggccgcuuaucuugcgggcggggacacagucuaccuggccaauuuuacccuccccgauagcgaguuccugaagauuuuuaaaccugaagcugccuuccuuccggagugggugggaaucaacgccgaccugucuccccucuggacccuggcuaagccuuga

SEQ ID NO: 3218 - RNA, 1380 nt, Artificial Sequence
  EAW58359 variant
auggcuccccugugcccuagcccguggcucccccugcuuaucccugcccccgccccuggccugaccgugcagcuccugcuuucccugcuccugcugguccccguucacccucaaagacucccgcggaugcaggaggacucuccccucgggggaggcagcuccggggaagaugacccucuuggagaggaagaucugcccucugaggaagacagcccucgcgaggaggaucccccgggcgaagaggaccucccuggggaagaggaucugcccggagaggaagaccuuccugaggugaagcccaaauccgaagaggaaggcucucugaagcucgaggaucugcccacaguggaggcgccuggcgacccgcaggaaccccagaacaaugcucauagagauaaagagggggacgaucaaagccacuggcgguacggaggcgacccucccuggccucgcgucucccccgccugugccgggagauuccagagcccgguggacauucggccucagcuggcugccuuuugccccgcucuccgcccucuggaacuucugggauuccagcugcccccucugcccgagcuuagacugcggaacaauggccauucuguucaacucacgcugccgccugggcuggaaauggcccucggacccggccgcgaguauagagcgcugcagcuucaucugcacuggggcgccgcugggcggcccggauccgagcacaccguggaaggccaccgcuuuccugccgagauccaugucgugcaccucagcacagcuuucgccagaguugaugaagcgcuggggcggccgggaggccuugccgugcuggcugccuuucucgaggaagggcccgaggagaacucugcuuacgaacagcugcugucccgccucgaggaaauugccgaggagggaagcgaaacccaggucccuggccuggacaucucugcccuucugcccuccgauuucagcagauauuuucaauacgagggcucccucacaaccccucccugugcucagggggugauuuggacaguguucaaucagaccgucaugcugucugcgaagcaacugcauacgcuuagcgacacccucuggggaccuggcgauucccggcugcagcugaacuuuagagccacacagccccucaaugggcgcguuaucgaagcuagcuucccggccggaguggacucuuccccucgggccgcugagcccgugcagcugaacagcugccuugccgcgggcgauauccuggcucucgucuuugggcugcuguucgccgugaccucuguugccuuucuugugcaaaugagacgccagcaccggagaggcacaaaaggaggcgucagcuaucgcccugcugaaguggccgagaccggggcuuga

SEQ ID NO: 3219 - RNA, 417 nt, Artificial Sequence
  U19142.1 variant
augagcuggagaggccgguccaccuaccgccccagaccucggcgcuauguggagccgcccgaaaugaucgggccuaugagacccgagcaguucucugacgaagucgagccugccacacccgaagagggagagccugcuacgcaacggcaggacccggccgcggcucaggaaggcgaggacgaaggggccagcgccggacagggccccaagccugaggcugauucccaagagcaggggcacccccagaccggaugcgaaugugaggacggcccugauggccaggaaauggaucccccgaacccugaggaaguuaaaacacccgaggaggaaaugcgcucucauuacguggcccaaaccgggauucuguggcuccugaugaauaacugcuuucuuaaucugagcccuagaaagcccuga

SEQ ID NO: 3220 - RNA, 351 nt, Artificial Sequence
  AAH69397 variant
augagcuggagaggccgguccaccuaccgccccagaccucggcgcuauguggagccgcccgaaaugaucgggccuaugagacccgagcaguucucugacgaagucgagccugccacacccgaagagggagagccugcuacgcaacggcaggauccggccgcggcucaggaaggccaggacgagggggccagcgccggacaaggccccaagccugaagcucacucccaggagcaggggcauccccagaccggaugcgagugugaagauggcccugacggccaagagauggaucccccgaacccugaagagguuaaaacacccgaagagggggagaagcagucucagugcuga

SEQ ID NO: 3221 - RNA, 357 nt, Artificial Sequence
  AAA82746 variant
augaaccugagcagaggcaaguccaccuacuauuggccccggccucgcagauacgugcagccgcccgaggucaucgggccuaugcggcccgaacaauucucugacgagguugaaccugccacacccgaggaaggagagccugcuacgcagcgccaggacccggccgcggcucaggagggcgaagacgagggggccagcgccggacaaggccccaaaccugaagcugauucccaggagcaggggcacccccagaccggaugcgagugugaagacggcccugauggccaagagauggaucccccgaauccugaagaggugaagacacccgaagagggggagaaacagucucagugcuga

SEQ ID NO: 3222 - RNA, 354 nt, Artificial Sequence
  AAH69470 variant
augagcuggagaggccgguccaccuacuauuggccccgcccuagacgguacgugcagccgcccgagaugaucgggccuaugcgccccgaacaauucucugacgaggucgaaccugccacacccgaggaaggagagccugcuacgcagagacaggacccggccgcggcucaggagggcgaagacgagggggccagcgccggacaaggccccaagccugaagcugauucccaggagcaggggcacccccagaccggaugcgagugugaagacggcccugauggccaagagauggaucccccgaacccugaagagguuaaaacacccgaagagggggagggacagucucagugcuga

SEQ ID NO: 3223 - RNA, 354 nt, Artificial Sequence
  AAA82748 variant
augagcuggagaggccgguccaccuacuauuggccccgcccuagacgguacgugcagccgcccgaggucaucgggccuaugcgccccgaacaauucucugacgagguugaaccugccacacccgaggaaggagagccugcuacgcagagacaggacccggccgcggcucaggagggcgaagacgagggggccagcgccggacaaggccccaagccugaagcugauucccaggagcaggggcacccccagaccggaugcgagugugaagacggcccugauggccaagagauggaucccccgaacccugaagaggugaaaacacccgaagagggggagaagcagucucagugcuga

SEQ ID NO: 3224 - RNA, 354 nt, Artificial Sequence
  AAA82749 variant
augagcuggagaggccgguccaccuacuauuggccccgcccuagacgguacgugcagccgcccgaggucaucgggccuaugcgccccgaacaauucucugacgagguugaaccugccacacccgaggaaggagagccugcuacgcagagacaggacccggccgcggcucaggagggcgaagacgagggggccagcgccggacaaggccccaagccugaagcugauucccaggagcaggggcacccccagaccggaugcgagugugaagacggcccugauggccaagagguggaucccccgaacccugaagaggugaaaacacccgaagagggggagaagcagucucagugcuga

SEQ ID NO: 3225 - RNA, 354 nt, Artificial Sequence
  AAC25989 variant
augagcuggagaggccgguccaccuacuauuggccccgcccuagacgguacgugcagccgcccgagaugaucgggccuaugcgccccgaacaauucucugacgaggucgaaccugccacacccgaggaaggagagccugcuacgcagagacaggauccggccgcggcucaggagggcgaagacgagggggccagcgccggacaaggccccaagccugaagcucacucccaggagcaggggcauccccagaccggaugcgagugugaagauggcccugacggccaagagauggaucccccgaacccugaagagguuaaaacacccgaagagggggagaagcagucucagugcuga

SEQ ID NO: 3226 - RNA, 351 nt, Artificial Sequence
  AAC33676 variant
augagcuggagaggccgguccaccuaccgccccagaccucggcgcuauguggagccgcccgaaaugaucgggccuaugagacccgagcaguucucugacgaagucgagccugccacacccgaagagggagagccugcuacgcaacggcaggacccggccgcggcucaggaaggcgaggacgaaggggccagcgccggacagggccccaagccugaggcugauucccaagagcaggggcacccccagaccggaugcgaaugugaggacggcccugauggccaggaaauggaucccccgaacccugaggaaguuaaaacacccgaggagggggaaaagcaaucucagugcuga

SEQ ID NO: 3227 - RNA, 1344 nt, Artificial Sequence
  AAA35657 variant
auggagcugcucaagcugaacagaagcgugcagggcaccgggcccggaccuggcgccucccuuugccggccgggggcuccccugcucaauucuagcuccgucggaaaccugucuugugaaccuccccgcaucagaggcgccgggacacgggagcuugaacuggcgauucgcaucacgcucuacgcuguuauuuuccugaugagcgugggaggcaauaugcugaucauugugguccucggccuguccagacggcuucgcaccgugacaaacgccuuucugcucucucuggccguuagcgaccuucugcucgcuguggccugcaugccuuucacccugcugcccaaucucauggggacauuuaucuucggaaccgucaucuguaaagcuguguccuaucugaugggcguuagcgugucugucuccacacuuagccugguggccauugcgcucgagagauacucugccaucugccggccucugcaagcucgcguguggcagaccagaucccacgccgcucgggucauuguugccacguggcuucugagcgggcuccugauggugccguaucccguguacaccgucgugcagccuguuggaccccgcgugcugcaguguguccauagauggccuucugcgcgggugcgccaaacaugguccguucuccugcuucugcuccuguuuuucauccccggcguggucauggccguggcuuaugggcuuauuagcagagaacuguaccucggacugcgguuugauggcgacuccgauucugacagccaguccagaguccgcaaccagggcgggcugccgggagccgugcaccagaauggccggugcagaccugagaccggggcuguuggagaggauagcgacggcuguuaugugcaacucccccgcucucggccugcccuggaacuuacagcccugaccgcucccgggcccggauccggcagcagaccuacgcaggcgaagcuccuggccaaaaagcgcgucgugcggaugcugcuuguuaucgugguccucuucuuucugugcuggcugccgguguacucugcuaacacauggagagccuucgauggccccggggcccaucgcgcucucagcggagccccuauuuccuuuauccaucugcuuucuuacgcgagcgcuugugugaauccccugguuuauugcuucaugcaccggagauuucgccaggccugucucgagaccugcgcccggugcuguccuagacccccgcgggcucgcccuagagcccugcccgacgaagauccucccacaccuuccaucgcuagccugucucggcuuuccuacaccaccauuagcacacucggccccggguga

SEQ ID NO: 3228 - RNA, 2226 nt, Artificial Sequence
  AAD22449 variant
auggcccuguucacccccuggaagcucagcucccagaaacugggcuuuuuccuugugacauuuggguucaucuggggaaugaugcugcuccacuuuacgauucaacagagaacccagccugagucuagcuccaugcugcgggaacagauccuugaccugucuaagcgcuacauuaaagcucucgccgaggaaaacagaaaugucguugauggcccguaugcgggggugaugacagcuuacgaccugaagaaaacccuggccgugcuccuggauaacauccuucaacggauuggaaagcuggagagcaaggucgacaaucucgugguuaacggcacagggaccaauuccacaaacucuaccacggccgugcccagccuggucgcucuugaaaagaucaauguggccgauaucauuaacggagcucaggagaagugcguucugccucccauggacggcuauccucauugugagggcaaaaucaaguggaugaaagauauguggcgcuccgaccccugcuacgccgauuaugggguggacggaagcaccuguucuuucuuuauuuaccucuccgaagucgagaauuggugcccucaccucccguggagagcgaagaaccccuaugaagaggccgaucauaauagccuggcugagauccggacagacuucaacauucucuacucuaugaugaagaaacacgaagaguuucgcuggaugagacugcggauccgcagaauggccgaugcuuggauucaggccaucaagucccuugcggaaaaacagaaucuggagaagcggaaacgcaagaaagugcucgugcaucugggccuucugaccaaggaaagcggguucaagaucgccgagacagcuuuuucuggaggcccucucggggagcugguccaaugguccgaccugauuaccagccucuaccugcuuggacacgacaucagaauuuccgccucucuggcugaacucaaagagaucaugaagaaaguugugggcaaccggagcggcugucccacggugggggaucgcauugucgaacugaucuauaucgacauugugggacuugcccaguucaagaaaacacugggcccuuccuggguucacuaccagugcaugcucagagugcuggauagcuuugggaccgagcccgaguucaaucaugccaacuaugcucagucuaagggacacaagacaccguggggcaaauggaaccugaauccucaacaguucuacaccauguuuccccauaccccugacaacuccuuccucggguuugucguggaacagcaccugaauagcucugauauccaccauauuaacgagaucaagcggcaaaaucagagccuuguuuauggaaaaguggacuccuucuggaagaacaaaaagauuuaccuggauaucauccacacauauauggaaguccaugcgacgguguacggcucuagcaccaagaauauucccuccuacgucaaaaaccacggcauccucagcgggagagaccugcaguuucugcuucgcgagacaaagcuguucgugggacugggcuuucccuaugaagggccugccccgcuggaggcuauugccaauggaugugccuuccucaaccccaaauuuaauccucccaagucuuccaaaaacaccgauuucuuuaucggcaagccuacacugcgggaacuuaccagccagcaucccuacgcugagguuuucauugggagaccgcacguguggacggucgaccugaauaaccaagaggaaguggaggaugccguuaaggcgauccucaaucagaaaauugaaccuuauaugcccuacgaguuuacaugcgagggcaugcugcagcgcaucaacgcuuucaucgaaaagcaggacuucugucacggacaagugauguggccuccccugucugcccuucaggucaaacucgccgagccuggccaguccugcaaacaggugugucaagaaagccagcugauuugcgagcccuccuuuuuccagcaucugaacaaagacaaggauaugcucaaauauaaggugaccugccagucuagcgaacuggcuaaggacauccuuguuccguccuuugauccuaaaaauaagcacugugucuuccaaggggaccugcuccuguuuucuugcgccggagcucauccccggcaccagagagugugucccugccgcgauuucauuaaaggccagguggcccuguguaaggacugccuuuga

SEQ ID NO: 3229 - RNA, 1743 nt, Artificial Sequence
  EAX11770 variant
auggccggcaccgugagaacagcuugccuggucguugccaugcuccugagccuugacuuccccgggcaggcgcaaccuccgcccccucccccugaugcuacgugucaccaggugcgguccuuuuuccagcgccugcagcccggacucaagugggugccugagaccccgguccccggcucugaccugcaagugugccuuccuaaagggcccacauguugcagcagaaagauggaagagaaauaccagcugaccgcccggcucaacauggaacagcugcugcaguccgccucuauggagcucaaguuucugaucauucaaaaugcugccguuuuccaggaggcuuuugaaaucgugguccgccaugccaaaaacuauacaaaugcgauguucaagaacaauuacccuagccuuacaccccaggccuuugaguucgugggagaauuuuucaccgauguuucccuguauauucucggcucugacaucaacguggaugacauggucaaugagcuguuugauagccuuuucccggugauuuacacccagcugaugaacccugggcuccccgacuccgcucuggauaucaaugaaugucugagaggagcccggcgcgaccucaagguguuuggcaacuucccuaaacugaucaugacgcaagucagcaagucucuucagguuaccagaauuuuccugcaggcucucaaucugggcaucgaggugauuaacacaaccgaucaccuuaaauuuuccaaggacugcgggcggaugcugacacgcaugugguauuguagcuacugccaaggacucaugauggugaaacccuguggcggguauugcaaugucgugaugcagggauguauggccggcguuguggagaucgauaaguacuggagagaauacauucugucucuggaggaacucgucaacgggauguaucggaucuacgacauggagaaugugcugcuuggacuguucuccaccauucaugacagcauccaguauguucagaagaacgcgggcaaacucacgacaaccaucggcaagcugugcgcccacucucaacagcgccaguacagauccgcuuauuaccccgaagaucuuuuuauugacaaaaaggugcugaaagucgcccauguggagcacgaggaaacacucagcucccggcgcagagagcugauccagaagcugaaaucuuucauuagcuuuuauuccgcucucccuggguacaucugcagccacucuccggucgccgaaaacgauacccuguguuggaauggacaagagcuuguggaacgguacucccagaaggccgcuagaaacggcaugaagaaucaguucaaccugcaugagcucaaaaugaaggggcccgagccuguugugagccagauuaucgacaaacugaagcacaucaaucaacugcuucgcaccaugucuaugcccaaaggacggguccucgauaagaaccuggacgaagagggcuuugaaagcggggauugcggagacgaugaggacgaauguauuggcggcuccggggauggaaugaucaaggugaaaaaucagcugagauuccucgcggagcuggccuaugaccuugacguugaugacgcuccuggcaacucucagcaggccacacccaaggauaaugagauuagcacguuucauaaccuggggaaugugcacuccccgcucaaacugcugaccagcauggccaucucugucgugugcuucuuuuuccuugugcacuga

SEQ ID NO: 3230 - RNA, 1743 nt, Artificial Sequence; identical to SEQ ID NO: 3229
  AAA93471 variant

SEQ ID NO: 3231 - RNA, 1743 nt, Artificial Sequence
  AAH35972 variant
auggccggcaccgugagaacagcuugccuggucguugccaugcuccugagccuugacuuccccgggcaggcgcaaccuccgcccccucccccugaugcuacgugucaccaggugcgguccuuuuuccagcgccugcagcccggacucaagugggugccugagaccccgguccccggcucugaccugcaagugugccuuccuaaagggcccacauguugcagcagaaagauggaagagaaauaccagcugaccgcccggcucaacauggaacagcugcugcaguccgccucuauggagcucaaguuucugaucauucaaaaugcugccguuuuccaggaggcuuuugaaaucgugguccgccaugccaaaaacuauacaaaugcgauguucaagaacaauuacccuagccuuacaccccaggccuuugaguucgugggagaauuuuucaccgauguuucccuguauauucucggcucugacaucaacguggaugacauggucaaugagcuguuugauagccuuuucccggugauuuacacccagcugaugaacccugggcuccccgacuccgcucuggauaucaaugaaugucugagaggagcccggcgcgaccucaagguguuuggcaacuucccuaaacugaucaugacgcaagucagcaagucucuucagguuaccagaauuuuccugcaggcucucaaucugggcaucgaggugauuaacacaaccgaucaccuuaaauuuuccaaggacugcgggcggaugcugacacgcaugugguauuguagcuacugccaaggacucaugauggugaaacccuguggcggguauugcaaugucgugaugcagggauguauggccggcguuguggagaucgauaaguacuggagagaauacauucugucucuggaggaacucgucaacgggauguaucggaucuacgacauggagaaugugcugcuuggacuguucuccaccauucaugacagcauccaguauguucagaagaacgcgggcaaacucacgacaaccaucggcaagcugugcgcccacucucaacagcgccaguacagauuugcuuauuaccccgaagaucuuuucauugacaaaaaggugcugaaagucgcccauguggagcacgaggaaacacucuccagccggcgcagagagcugauccagaagcugaaauccuuuauuucuuucuauagcgcucucccuggguacaucugcucccacagcccggucgccgaaaacgauacccuguguuggaauggacaagagcuuguggaacgguacucucagaaggccgcuagaaacggcaugaagaaucaguuuaaccugcaugagcucaaaaugaaggggcccgagccuguugugucccagauuaucgacaaacugaagcacaucaaucaacugcuucgcaccaugagcaugcccaaaggacggguccucgauaagaaccuggacgaagagggcuucgaaucuggggauugcggagacgaugaggacgaauguauuggcggcagcggggauggaaugaucaaggugaaaaaucagcugagauuucucgcggagcuggccuaugaccuugacguugaugacgcuccuggcaacucccagcaggccacacccaaggauaaugagauuucuacguuccauaaccuggggaaugugcacagcccgcucaaacugcugaccuccauggccaucagcgucgugugcuuuuucuuucuugugcacuga

SEQ ID NO: 3232 - RNA, 1683 nt, Artificial Sequence
  EAW93784 variant
auggagugccuguacuauuuccucggcuuucugcuucuggccgcuagacucccccuggacgccgcgaagcgguuccacgaugugcuugggaacgaacgcccuagcgcuuacaugagagagcauaaucagcugaacggaugguccucugacgaaaaugauuggaacgagaaacucuauccggucuggaagcggggcgacaugcgcuggaaaaauagcuggaaagggggaagaguucaagccgugcugaccuccgauucucccgcccuggugggcagcaacaucacauuugcugucaaucucauuuucccucggugucagaaagaagacgccaacgggaauaucguguacgagaagaacugccgcaaugaggcuggacuguccgccgaucccuauguuuacaacuggacggcguggucugaagacagcgauggcgagaauggcaccgggcagucccaccauaacguguuuccugacggaaagcccuucccucaccauccgggcuggagacgguggaauuuuauuuaugucuuccacacacuugggcaguacuuucaaaaacugggacgcuguagcgugagaguuucugugaacaccgccaacgucacacucggcccccagcugauggaagugaccguguaccggcgccacgggagagcuuaugucccuaucgcccagguuaaggauguguacguggucacagaccagauucccguguucguuaccauguuucaaaagaaugaucggaacuccagcgacgagacguuccuuaaggaccugccuaucauguuugaugugcucauccaugaccccucucacuuccugaauuauuccaccauuaacuacaaauggagcuucggagauaauacaggccuguuugucucuaccaaccauacagugaaucacaccuauguucucaacggcacguucucccugaaucuuacagugaaggcugccgcgccggggccuugucccccucccccucccccgccccgcccuagcaagcccaccccuucccugggacccgccggcgacaacccgcucgagcugucuagaaucccugaugaaaauugccagauuaaccgguacgggcacuuucaggcuacaaucaccauugucgagggaauccuugaagugaauauuauccagaugaccgacguccugaugcccgugccuuggcccgagagcucccucaucgauuucguugugacaugccaaggcagcauuccuacggaagucuguaccaucauuucugaccccacaugcgagaucacccagaacacaguguguuccccgguugauguggacgagaugugccugcugaccgucagacgcacguuuaaugggagcggaacauauugugugaaccucacccugggcgaugacaccucucuugcccugacaagcacccucauuuccgugccugaccgggaucccgcuucuccccugagaauggccaacagcgcccuuaucuccguuggcugccuggcuaucuucgucacagugauuagccuccugguguacaaaaagcauaaagaauacaauccuaucgagaacucuccggggaaugucgugcgcuccaagggacugagcguuuuucucaaccgggcgaaagccguguucuuucccggcaaucaggaaaaggacccucugcuuaaaaaccaagaguucaagggggucucuuga

SEQ ID NO: 3233 - RNA, 1719 nt, Artificial Sequence
  AAH32783 variant
auggagugccuguacuauuuccucggcuuucugcuucuggccgcuagacucccccuggacgccgcgaagcgguuccacgaugugcuugggaacgaacgcccuagcgcuuacaugagagagcauaaucagcugaacggaugguccucugacgaaaaugauuggaacgagaaacucuauccggucuggaagcggggcgacaugcgcuggaaaaauagcuggaaagggggaagaguucaagccgugcugaccuccgauucucccgcccuggugggcagcaacaucacauuugcugucaaucucauuuucccucggugucagaaagaagacgccaacgggaauaucguguacgagaagaacugccgcaaugaggcuggacuguccgccgaucccuauguuuacaacuggacggcguggucugaagacagcgauggcgagaauggcaccgggcagucccaccauaacguguuuccugacggaaagcccuucccucaccauccgggcuggagacgguggaauuuuauuuaugucuuccacacacuugggcaguacuuucaaaaacugggacgcuguagcgugagaguuucugugaacaccgccaacgucacacucggcccccagcugauggaagugaccguguaccggcgccacgggagagcuuaugucccuaucgcccagguuaaggauguguacguggucacagaccagauucccguguucguuaccauguuucaaaagaaugaucggaacuccagcgacgagacguuccuuaaggaccugccuaucauguuugaugugcucauccaugaccccucucacuuccugaauuauuccaccauuaacuacaaauggagcuucggagauaauacaggccuguuugucucuaccaaccauacagugaaucacaccuauguucucaacggcacguucucccugaaucuuacagugaaggcugccgcgccggggccuugucccccucccccucccccgccccgcccuagcaagcccaccccuucccuggccacaacccucaaaucuuacgacagcaacacccccggaccggcuggcgauaauccucuggagcuuuccagaauccccgacgaaaacugccagauuaaucgguaugggcacuuucaggccacaaucacgauugucgagggaauccuggaagugaacauuauccagaugaccgauguccucaugccugugcccuggccugagagcucucugaucgacuucguugugacaugccaaggcuccauucccaccgaagucuguacaaucauuagcgauccgaccugcgagaucacgcagaauacaguguguucuccuguugacguggaugagaugugccugcucaccgucagacgcaccuuuaacgggagcggaacauacugugugaaccugacccuuggcgacgacacaucccuggcucucacgucuacccugauuagcgugcccgaucgggaccccgccuccccucuuagaauggccaauagcgcucugaucucuguuggcugccucgcgaucuucgucacagugauuucccugcugguguacaagaaacauaaggaauauaacccgaucgagaauagccccgggaacgucgugcgcucuaaaggacucuccguuuuucugaaucgggccaaggcuguguucuuuccuggcaaccaggaaaaagauccccuucugaagaaucaagaguucaagggggucagcuga

SEQ ID NO: 3234 - RNA, 621 nt, Artificial Sequence
  CAD43718 variant
auggagugccuguacuauuuccucggcuuucugcuucuggccgcuagacucccccuggacgccgcgaagcgguuccacgaugugcuugggaacgaacgcccuagcgcuuacaugagagagcauaaucagcugaacggaugguccucugacgaaaaugauuggaacgagaaacucuauccggucuggaagcggggcgacaugcgcuggaaaaauagcuggaaagggggaagaguucaagccgugcugaccuccgauucucccgcccuggugggcagcaacaucacauuugcugucaaucucauuuucccucggugucagaaggaagacgccaacgggaauaucguguacgagaagaacugccgcaaugaggcuggacuguccgccgaucccuauguuuacaacuggacggcguggucugaagacagcgauggcgagaauggcaccgggcagucccaccauaacguguuuccugacggaaagcccuucccucaccauccgggcuggagacgguggaauuuuauuuaugucuuccacacacuugauuggcugcuccagacccccaaacugcuucuguaccucagccugaaguuucaaccuucucuguuccuccuguacaacuga

SEQ ID NO: 3235 - RNA, 621 nt, Artificial Sequence
  AAH11595 variant
auggagugccuguacuauuuccucggcuuucugcuucuggccgcuagacucccccuggacgccgcgaagcgguuccacgaugugcuugggaacgaacgcccuagcgcuuacaugagagagcauaaucagcugaacggaugguccucugacgaaaaugauuggaacgagaaacucuauccggucuggaagcggggcgacaugcgcuggaaaaauagcuggaaagggggaagaguucaagccgugcugaccuccgauucucccgcccuggugggcagcaacaucacauuugcugucaaucucauuuucccucggugucagaaggaagacgccaacgggaauaucguguacgagaagaacugccgcaaugaggcuggacuguccgccgaucccuauguuuacaacuggacggcguggucugaagacagcgauggcgagaauggcaccgggcagucccaccauaacguguuuccugacggaaagcccuucccucaccauccgggcuggagacgguggaauuuuauuuaugucuuccacacacuuggguggcugcuccagacccccaaacugcuucuguaccucagccugaaguuucaaccuucucuguuccuccuguacaacuga

SEQ ID NO: 3236 - RNA, 2640 nt, Artificial Sequence
  CCDS5600.1 variant
augaagaugcugaccagacuccaggugcugacacuugcccuguucagcaaaggcuuucuccugucccuuggggaccacaacuuccugcggcgcgagaucaagauugaaggagaucucguccugggcgggcuguuucccaucaaugagaaaggaacgggcaccgaagagugcgggagaauuaacgaagaccggggaauccaacgccucgaggcuaugcuguucgccauugaugagaucaauaaggacgauuaccuucugccuggcguuaaacucggcgugcauauccuggacacauguucuagagauaccuaugcgcuugaacagagccuggaguuugugcgggcuucccucacaaaggucgacgaagccgaguacaugugcccggaugggucuuaugccauucaggagaacaucccccugcugauugcuggagugaucggcgggagcuacuccucuguuagcauucagguggccaaucuccugcgccuuuuccaaaucccucagauuuccuaugcuagcaccucugccaagcuguccgacaaaagcagauacgauuauuuugcgcggacagugcccccugacuucuaccaggccaaggcuauggccgaaauccuccgcuuuuucaacuggaccuacgucucuacgguugcuuccgagggagauuauggcgaaaccgggaucgaggccuuugaacaggaggcgagacugcggaauauuuguaucgccacagcugagaaagugggacgcagcaacauuagaaagucuuacgacuccgucauccgggaacuucugcaaaaacccaaugcccgcguggugguccucuucaugagaagcgacgauucccgggagcugauugcugccgccucuagagcuaacgcgagcuuuaccuggguugccuccgacggcuggggcgcucaggaaagcaucaucaaggggucugagcacguggccuauggagccauuacacuggaacucgcuucccagccugugcgccaguucgaucgguacuuccaaagccugaauccguauaacaaucauagaaaccccugguuucgcgacuucugggagcagaaguuucagugcucucuucaaaauaaacggaaccacagacgcgucugugauaagcaucuggccaucgacagcuccaacuacgagcaggaaucuaaaauuauguucgugguuaaugcgguguaugcuauggcccacgcccuccacaagaugcagcggacccugugcccuaacacgacaaaacuuugugaugcuaugaagauccuggacggcaaaaagcucuacaaggauuaccugcugaaaauuaauuuuaccgcccccuucaacccuaauaaggacgcugauagcaucgucaaauuugacacauucggggacggaaugggcagauauaacguguuuaauuuccagaacguugggggaaaguacuccuaucucaaagugggccauugggccgagacccugagccuugaugucaauucuauccacuggucccgcaacagcgugcccaccucucaaugcuccgacccgugugcgccuaaugaaaugaagaacaugcagcccggcgaugucugcuguuggauuugcaucccuugcgagcccuacgaauaucuggccgacgaguuuacauguauggauugcgggagcggacaguggcccacggcugaccucaccggcuguuacgaucugccugaggacuauauucggugggaagaugccugggcuaucgggccggugacaauugccugccugggauucauguguaccugcaugguugugacagucuuuaucaagcauaauaacacgccccuugugaaagcguccggcagagagcucuguuacauucugcuguucgggguuggccucucuuacugcaugaccuucuuuuucaucgccaagccuagccccgugaucugugcucugcgccggcuuggacugggcuccucuuuugccauuugcuauagcgcucuccugacaaaaaccaauuguaucgccagaauuuucgacggggucaagaacggagcccagcggccuaaauuuaucucccccagcucucaaguguucauuugccugggccuuauccucgugcagaucguuauggucuccguguggcugauucuggaagcuccggggacccgcagauacacacucgcggagaagcgggagaccgugauccugaagugcaacgucaaagauagcucuaugcuuauuucccugacauaugacgugauccucguuauucuguguacgguguacgccuuuaagaccagaaaaugcccugaaaauuucaacgaggcuaaguuuaucggauucacaauguauaccacauguaucauuuggcuggccuuucuucccaucuucuacgucaccagcucugauuaucgcgugcagacgaccacaaugugcauuagcguuucccucagcggcuuugugguccuggggugucuguucgccccuaaagugcacaucauucucuuccagccccaaaagaauguugugacccaccggcugcaucuuaacagauuuucugucuccggcacaggaaccacguacagccaguccucugcuagcacauacgugccuaccgugugcaauggccgcgaaguccuggacuccacaaccucuagccucuga

SEQ ID NO: 3237 - RNA, 1947 nt, Artificial Sequence
  CCDS4977.1 variant
augagccaccauggcggggcccccaaggcuuccaccuggguggucgccucuagacggagcuccacaguuucucgcgcgccugagagacggccggcugaagaacugaaccgcacgggacccgaaggcuacagcguggggagaggaggccgguggcgcgggaccuccagaccucccgaggccguggccgcuggacacgaggagcucccucugugcuucgcccuuaaaucucauuuugucggcgcugugaucggccgcgggggaagcaagauuaaaaauauccaguccacaaccaacacaaccauucaaaucauucaggagcagcccgaaagccugguuaagaucuucggcucuaaagccaugcagacaaaggcgaaggccgugaucgacaauuuugucaaaaagcucgaggaaaacuauaauuccgagugugggauugauaccgcuuuccaaccuagcgugggaaaagacggcucuacggauaacaauguuguggccggggaccggccgcugaucgauugggaccagauuagagaggaaggacuuaaguggcagaaaaccaagugggcugaucugcccccuaucaagaaaaacuuuuacaaggaguccacagccaccagcgcgaugucuaaagucgaagccgacuccuggcggaaggagaauuucaacauuacaugggaugaccucaaagauggcgaaaagcgccccaucccuaauccgaccugcacguuugacgaugcuuuccaguguuaucccgaggugauggagaacauuaaaaaggccggcuuucaaaagccuacacccauccagagccaggcuuggccuaucgugcugcaggggauugaccugaucggagucgcccaaaccggcacagggaaaacccucugcuaccugaugcccggauucauucaccuuguucugcagcccucccucaagggccagagaaaucggccugggaugcuggugcuuaccccgacacgcgaacuggcccuccaaguggagggagaauguugcaaauauucuuacaagggccugagaagcgucuguguguauggcgggggaaaccgggacgagcagaucgaggaacugaaaaagggcguugauauuaucaucgcuacgcccgggagacucaaugaccugcagauguccaacuuugugaaccuuaagaauauuaccuaccugguccucgaugaggcggacaaaaugcuggauaugggauucgaaccucagaucaugaagauucuucuggacgugcgccccgaucggcaaacaguuaugaccagcgccacauggccucauucugugcacagacucgcucaguccuaccugaaagagcccaugaucgucuaugugggcacccuggaccucgucgccgugagcucuguuaagcagaacauuaucgugacgacagaagaggaaaaauggagccacaugcagaccuuucugcaauccaugucuagcaccgauaaggucaucguguucguuucccgcaaggccguggcugaccaucuuagcucugaucugauucucgggaauaucuccgucgagagccugcacggcgaccgggagcagagagaccgcgaaaaagcccuugagaacuucaagacaggaaaagugcggauucugaucgcgaccgaucucgcuucuagaggccuggacgugcaugauguuacacacgucuacaauuuugacuucccgcgcaacauugaagaguaugugcaccggaucgggagaacgggacgcgccggccggaccgggguguccauuacaacccugacaagaaaugauuggcgggucgccagcgagcucaucaacauccuggaacgcgcuaaucaguccauuccugaggaacuugugucuauggccgagagauuuaaggcucaucagcaaaaacgggaaauggagagaaagauggagcgcccccagggacggccuaagaaauuccacuga

SEQ ID NO: 3238 - RNA, 1209 nt, Artificial Sequence
  ACD02430 variant
auggcccagaaggagggcgggagaaccgugcccugcuguagccggccuaaagucgcugcccugacagcgggaacgcuccugcuucugaccgcuaucggcgccgccuccugggcuauuguugccgugcuccugcgcucugaccaagaaccgcuuuaccccgugcaggucagcuccgcugaugccagacugaugguguucgacaagacagaggggaccuggcggcuccugugcucuagccgcuccaacgcgagaguugccggacugucuugugaagagaugggcuuucuccgggcucugacacacagcgaacuugaugugcgcaccgccggggcuaauggaacauccggcuucuuuugcgucgacgagggcagacugccucauacccagcggcuccuggaggugaucagcguuugugauugcccccgcgggagauuccuugccgcgauuugucaggacugcggacggcgcaaacugccuguggauagaaucgucggcgggcgggacacgucucucggacgcuggcccuggcaagugucccugagauaugauggcgcccaccugugugggggaagccuccugucuggcgacugggugcuuaccgcugcccauugcuuuccugaacggaacagaguccugucccgcuggcggguuuucgcuggcgccguggcccaggcuagcccgcacgggcuccagcugggagugcaggcggucguguaccauggcggguaucuucccuuuagagauccuaauucugaggaaaacuccaaugacauugcccugguucaccucagcucuccccugccucugacagaguacauccaacccgugugucucccggcugccggacaggcccuggucgauggcaagaucugcaccgugacaggguggggaaacacccaguauuacggccagcaagcuggcguucuucaggaggcccgcgugccuauuaucuccaaugacgucugcaacggggcggacuucuauggaaaucagauuaaacccaagauguuuugugcuggcuacccugaagggggaaucgaugccugccaaggcgacagcgggggccccuucgugugugaggauuccauuagccggacgcccagauggcgccugugcggaaucgucucuuggggcacagggugugcccucgcucagaagccuggaguguacaccaaaguuuccgacuuucgggaauggauuuuccaguga

SEQ ID NO: 3239 - RNA, 1254 nt, Artificial Sequence
  AAA36013 variant
auggcccagaaggagggcgggagaaccgugcccugcuguagccggccuaaagucgcugcccugacagcgggaacgcuccugcuucugaccgcuaucggcgccgccuccugggcuauuguugccgugcuccugcgcucugaccaagaaccgcuuuaccccgugcaggucagcuccgcugaugccagacugaugguguucgacaagacagaggggaccuggcggcuccugugcucuagccgcuccaacgcgagaguugccggacugucuugugaagagaugggcuuucuccgggcucugacacacagcgaacuugaugugcgcaccgccggggcuaauggaacauccggcuucuuuugcgucgacgagggcagacugccucauacccagcggcuccuggaggugaucagcguuugugauugcccccgcgggagauuccuugccgcgauuugucaggacugcggacggcgcaaacugccuguggauagaaucgucggcgggcgggacacgucucucggacgcuggcccuggcaagugucccugagauaugauggcgcccaccugugugggggaagccuccugucuggcgacugggugcuuaccgcugcccauugcuuuccugaacggaacagaguccugucccgcuggcggguuuucgcuggcgccguggcccaggcuagcccgcacgggcuccagcugggagugcaggcggucguguaccauggcggguaucuucccuuuagagauccuaauucugaggaaaacuccaaugacauugcccugguucaccucagcucuccccugccucugacagaguacauccaacccgugugucucccggcugccggacaggcccuggucgauggcaagaucugcaccgugacaggguggggaaacacccaguauuacggccagcaagcuggcguucuucaggaggcccgcgugccuauuaucuccaaugacgucugcaacggggcggacuucuauggaaaucagauuaaacccaagauguuuugugcuggcuacccugaagggggaaucgaugccugccaaggcgacagcgggggccccuucgugugugaggauuccauuagccggacgcccagauggcgccugugcggaaucgucucuuggggcacagggugugcccucgcucagaagccuggaguguacaccaaaguuuccgacuuucgggaauggauuuuccaggccaucaagacacacagcgaggcuucuggcauggugacccagcuguga

SEQ ID NO: 3240 - RNA, 2940 nt, Artificial Sequence
  BAG62073 variant
auggagcuggccgcucucugcagauggggccugcuucuggcccuccugcccccuggggcggcuagcacccaggacaacuaccuuuccacagaugugggaucuuguacgcuggucugcccgcuccacaaucaagaaguuaccgccgaggacggcacacagcggugugaaaagugcagcaaacccugugcccgcgugugcuaugggcugggaauggagcaccugagagaagugcgggcugucaccuccgccaacauccaggaguucgcuggcuguaagaaaauuuuugggucucucgccuuccugccugagagcuuugauggagaccccgcguccaauacagccccucuucagcccgaacaacuccagguguucgagacccuggaagagaucacaggcuaccuguauauuucugcuuggccugauagccuuccggaccuguccguuuuucagaaccuccaggugauccgcggccggauucugcacaauggggccuacagccugacccuccaaggacugggcaucucuuggcuugggcugcggucccuccgcgagcugggaagcggccuugcucugauccaucacaacacgcaucucugcuucguccacaccgugcccugggaucagcuguuuagaaauccucaccaggcccugcuccauacagcgaaccggcccgaagacgaguguguuggggaaggacuggccugccaccagcuuugugcucgcggccauugcuggggcccugggcccacccaaugcgugaauuguucucaguuccugagaggacaggagugcgucgaagagugucgggugcuccaaggccugccgcgcgaguaugugaacgccagacacugccuuccuugucaccccgaaugccagccucagaauggguccgucacauguuuuggacccgaggcugaucagugcguugccugugcccauuacaaggaucccccuuucugcguggcucgguguccgagcggcgugaaacccgaccugucuuauaugccuauuuggaaguuucccgacgaagagggggcgugccaaccuugccccaucaacuguacccacuccugcgucgaucucgacgacaagggauguccggccgaacagcgcgcuagcccucugacguccauuaucucugccgugguuggcauucugcucguggucgugcugggcguuguguucgggauccuuauuaaaagacggcagcagaagaucagaaaauacacaaugcgccggcugcuccaagagaccgagcuggucgaaccccugacaccuagcggagccaugcccaaucaggcucagaugagaauccuuaaggagaccgaacuccgcaaagugaagguccugggcuccggggccuuuggaaccguguacaagggcauuuggaucccugauggggagaacguuaaaauucccguggcgaucaagguccugcgggaaaauacaagcccgaaagcuaacaaggagauucucgacgaggccuaugugauggccggcguuggaucuccuuacguguccagacugcuuggcaucugccugacgagcaccguccagcucgugacacaacugaugcccuaugggugucugcuugaucaugugcgcgaaaaccggggaagacucggcucucaggaccugcugaauuggugcaugcagaucgcuaaagggaugagcuaccucgaggauguucgccugguccaccgggaccuugccgcuagaaacgugcuggugaagucccccaaucaugucaaaauuaccgauuucggacucgcccgccugcuggacaucgaugaaacagaguaucacgcggacggcgggaaggugccuauuaaguggauggcccuugagucuauccuccggagacgguucacccaccagagcgauguuugguccuacggcgugacggucugggaacugaugacauuuggagcuaaaccguaugacggcauucccgcccgcgagaucccugaccugcucgaaaagggggagagacugccccaaccucccaucuguaccauugauguguacaugaucaugguuaaaugcuggaugauugacagcgaaugucggccuagauuccgcgagcuugugucugaguuuucccggauggcuagagauccccagcgcuucgucgugauccagaacgaagaccugggaccggccagcccucucgauucuaccuuuuacagaucccugcuggaggacgaugacaugggcgaucuuguugacgcggaagaguaucucgugccccaacagggguucuuuugcccugaucccgccccgggagcuggcgggaugguccaucaccggcaucgcagcuccucuacaagaagcggcggaggcgaccugacccuggggcucgaaccuuccgaggaggaagcccccagaucuccucuggcucccagcgagggagccggcuccgauguguucgacggggaccuuggaaugggcgccgcuaaggggcugcagagccuccccacacacgauccuucuccgcugcagcgcuacuccgaagaccccacggugccucugcccagcgagaccgauggcuaugucgcgccucuuacauguucuccccaaccugaauacguuaaucagccggacgugagaccccagccucccuccccucgggagggaccccugccggccgcucgcccugccggcgccacccucgagagacccaaaacacugagccccgggaagaacggaguggucaaggauguguuugcuuucggcggggccguugaaaauccugaguaucucacgccccagggaggcgcggcuccucaaccgcaucccccucccgccuuuucuccugccuucgacaaccuguacuauugggaucaggaucccccggaacggggcgcuccucccagcaccuuuaaagggaccccuacagccgagaaucccgaguaccuuggacuggacgugccugucuga

SEQ ID NO: 3241 - RNA, 264 nt, Artificial Sequence
  CCQ43016 variant
augaugagaaugaagaccuucgugaugauccacuuucaucugaugaacggcgggaaagccaagcucuacagccggccccacgcuaaacugcuuccugagcagcgcgucacagacaagacgggagccccgguugaauggcccggccaaacccagugcuccacagagacccagacacuggcggcuaugccugcccaggccgugaugagagugaccuguacagucguggauaugcauaaaucugaaugcgcucccgcccaaaccuga

SEQ ID NO: 3242 - RNA, 3768 nt, Artificial Sequence
  AAI67147 variant
auggagcuggccgcucucugccgguggggccugcuucuggcccuccugcccccuggggcggcuagcacccagguguguacaggaacggacaugaagcugcggcuuccggccucccccgaaacccaccucgauaugcugcgccaucuguaccaaggcugccaggucguucaggggaaccucgagcugacauaucuuccuaccaaugccucucugagcuuccuccaggacauccaagaagugcagggauacgugcugauugcucacaaccaggucagacaggugccccuucaacggcugcgcaucguuagaggcacacagcucuuugaggauaauuaugcccuggcugugcuggacaacggggauccucucaauaacaccacacccgucaccggagccuccccuggcggccugcgggaacuucagcugcgcucucucacggagauucugaaagggggagugcuuauccagagaaauccgcaacuguguuaccaggacaccauucucuggaaggauaucuuccauaaaaacaaucagcuggcgcugacacucaucgacaccaaccggagccgcgccugccaccccuguuccccuaugugcaagggcucuagauguuggggagagagcuccgaagauugccaaagccugacacggaccguuugugcugggggcugcgcccgcuguaaagggccccuuccuacggacugcugccaugagcagugugcugccggaugcacaggccccaagcacucugauugucuggcgugccuccacuuuaaucauuccggcauuugugaacugcacugcccggcccuugugaccuauaacacagacaccuucgagagcaugccuaaucccgaggggagauacaccuuuggagcuucuugugucacagccugcccuuauaacuaccuguccacggaugugggcagcuguacccucgugugcccccugcauaaucaggaagucacagcugaggacgggacccagcggugugaaaagugcucuaaacccugcgcccgcguuuguuacggacugggcauggagcaccucagagaagugcgggccgugacauccgcuaacauccaagaguucgcggggugcaagaaaauuuuuggaagccuggccuuccuuccugaguccuuugacggcgauccggcuucuaacaccgcuccccugcagccugaacagcuccaggucuucgagacgcuggaagagaucacaggcuaucuguacauuagcgccuggcccgacucccuuccugaucucagcguguuucaaaaucugcagguuaucagagggcgcauucugcacaacggagccuauucucucacccugcagggccuugggaucuccuggcugggacuccggagccugagagaacugggcucugggcuugcccucauccaucacaauacccaucuguguuucgugcacacaguccccugggaccagcuguuucgcaacccgcaucaagcgcuccugcacaccgcuaaucggccugaggaugagugcgugggcgaaggacuugccugucaccagcugugcgccagaggccauuguugggggcccggaccuacacagugcguuaacuguagccaguuccuccgcggccaagagugcguggaagagugucggguccugcaggggcugcccagagaauacgugaaugcucgccacugccuuccuugccaucccgagugucagccgcaaaacggauccgucacgugcuucggcccugaggccgaccaguguguggcuugcgcccacuauaaggauccucccuuuuguguugcgcggugccccucuggggugaaaccggaccucagcuacaugcccauuuggaaguucccugaugaagagggcgccugucagcccugcccuaucaauuguacccacuccugcgucgaccuggaugacaagggaugucccgcugaacagagagccagcccucugacaucuauuaucuccgcugugguuggcauucuccugguggucgugcuuggggugguuuuuggaauccugaucaaacgccggcaacagaagauuagaaaauauaccaugcggcgccuccugcaggagacagagcuggucgaaccccuuaccccgagcggcgccaugccuaaccaggcgcaaaugagaauccucaaggagacggaacugcggaaagugaaggugcuggggucuggagccuucggcaccgucuacaaagggauuuggauccccgacggcgagaaugugaagauuccuguugcuaucaaggugcucagagaaaacacaucccccaaagccaauaaggagauccuggaugaggcuuacgucauggccggagugggcagcccguauguuucccgccuucuggggauuugccucaccucuacagugcagcuggucacccagcugaugccuuacggaugccuucuggaccaugugcgggaaaacagaggccgccucgggagccaggaucugcucaauugguguaugcaaaucgccaaaggaauguccuaucuggaggacguuagacuugugcaccgggaucuggcugcgcgcaacguccucgugaagucucccaaccaugugaaaauuacggacuuuggccuggccagacugcuugauaucgacgaaacagaguaccacgcugaugggggcaaggucccuauuaaguggauggcccuggaaagcauccuccggcgcagauucacccaucaguccgacguuuggagcuauggagugacagugugggagcugaugaccuuuggcgccaaacccuacgaugggauucccgcucgggagaucccugaccuccuggaaaagggagagcgccuuccgcagcccccuaucugcaccauugaugucuauaugaucauggugaaauguuggaugauugacucugaaugcagaccccgguuccgcgagcugguuuccgaauuuagcagaauggcccgggacccucaaagauucguggucauccagaaugaggaucucggccccgcgucuccucuggacuccacauuuuaccgcagccugcuugaggaugacgauaugggggaccugguggaugcugaagaguaccucguuccgcagcagggauucuuuugucccgacccugcccccggcgccggcgggauggugcaccaccggcauagaucuagcuccacgcgcagcggaggcggggaucugacccucggacuggaaccuucugaggaggaagcuccccgguccccgcuugccccuagcgagggcgcgggguccgacgucuucgauggagaccugggcaugggcgcugccaaggggcugcaaucucuccccacacacgaucccagcccucugcagagauauuccgaagaccccaccgugccucuuccgucugagacagacggauacguugcuccccugaccugcagcccucagcccgaauaugugaaccagccugauguccgcccccaaccgccuucuccccgggagggcccucuccccgccgccagaccugcuggggccacgcuggagcgccccaaaacacucuccccgggaaagaauggcguggugaaggacgucuucgcguuugggggagccguugaaaacccugaguaccugacaccccagggcggcgcugcuccccagccucauccgcccccugccuucagccccgccuuugauaaucuuuauuacugggaccaggauccucccgaaagaggggccccuccguccaccuucaaaggaacccccaccgcugagaacccugaauaucugggccuggacgugcccguguga

SEQ ID NO: 3243 - RNA, 1260 nt, Artificial Sequence
  AAD56009 variant
auggagcuggccgcucucugcagauggggccugcuucuggcccuccugcccccuggggcggcuagcacccagguguguacaggaacggacaugaagcugcggcuuccggccucccccgaaacccaccucgauaugcugcgccaucuguaccaaggcugccaggucguucaggggaaccucgagcugacauaucuuccuaccaaugccucucugagcuuccuccaggacauccaagaagugcagggauacgugcugauugcucacaaccaggucagacaggugccccuucaacggcugcgcaucguuagaggcacacagcucuuugaggauaauuaugcccuggcugugcuggacaacggggauccucucaauaacaccacacccgucaccggagccuccccuggcggccugcgggaacuucagcugcgcucucucacggagauucugaaagggggagugcuuauccagagaaauccgcaacuguguuaccaggacaccauucucuggaaggauaucuuccauaaaaacaaucagcuggcgcugacacucaucgacaccaaccggagccgcgccugccaccccuguuccccuaugugcaagggcucuagauguuggggagagagcuccgaagauugccaaagccugacacggaccguuugugcugggggcugcgcccgcuguaaagggccccuuccuacggacugcugccaugagcagugugcugccggaugcacaggccccaagcacucugauugucuggcgugccuccacuuuaaucauuccggcauuugugaacugcacugcccggcccuugugaccuauaacacagacaccuucgagagcaugccuaaucccgaggggagauacaccuuuggagcuucuugugucacagccugcccuuauaacuaccuguccacggaugugggcagcuguacccucgugugcccccugcauaaucaggaagucacagcugaggacgggacccagcggugugaaaagugcucuaaacccugcgcccgcggaacacacucccugccuccgagacccgccgcuguuccugugccccuccggaugcaaccuggccccgcgcacccggugcugagcuuccuuagaccuuccugggaccuggucucugccuuuuacagccucccccuggcuccucugucccccaccagcgugccuaucucucccguuuccguggggcgcggaccggauccugacgcccaugucgccguggaucuuagccgguaugagggcuga

SEQ ID NO: 3244 - RNA, 546 nt, Artificial Sequence
  U70863.1 variant
ggcagccacuccaugagauacuucuuuaccucugugagccggcccgggcgcggagagccuagauucaucgccgucggcuauguugacgauacacaguuugugcgguucgacuccgaugcugccucucaacgcauggaaccgagagcgcccuggauugagcaggaagggccugaguacugggacggagaaacgcggaaggugaaagcucauagccagacccaccgcgucgaucugggcacacucagaggguauuacaaccaguccgaggccggaucucauaccgugcaacggauguauggcugcgacguuggcagcgauuggcgcuuucugagaggguaccaccaguaugccuacgacggaaaggauuacaucgcucuuaaagaggaccugcgguccuggacagccgcugauauggccgcgcagaccacaaagcauaaaugggaaaccgcccacguggcugagcagcuccgcgccuaucuggaaggcacgugugucgaguggcuuagacgguaccuggagaaugggaaggaaacccuccaacgcaca

SEQ ID NO: 3245 - RNA, 543 nt, Artificial Sequence
  AH009136.2 variant
agccacuccaugagauacuucuuuaccucugugagccggcccggccgcggggagccuagauucaucgccgucggauauguugacgauacacaguuugugcgguucgacuccgaugcugccucucaacgcauggaaccgagagcgcccuggauugagcaggaaggcccugaguacugggacggggaaacgcggaaggugaaagcucauagccagacccaccgcgucgaucugggaacacucagaggcuauuacaaccaguccgaggccgggucucauaccgugcaacggauguauggaugcgacguuggcagcgauuggcgcuuucugagaggcuaccaccaguaugccuacgacgggaaggauuacaucgcucuuaaagaggaccugcgguccuggacagccgcugauauggccgcgcagaccacaaagcauaaaugggaagccgcucacguggccgagcagcuccgcgcuuaucuggaaggaaccugugucgaguggcuuagacgguaccuggagaauggcaaggaaacgcuccaacgcacc

SEQ ID NO: 3246 - RNA, 705 nt, Artificial Sequence
  AAG09781 variant
augcugagagugcccgagccucggccgggcgaagccaaggcugagggggccgcgcccccuacccccagcaaaccucucacauccuuccugauccaggacauucuucgcgauggagcucaaagacagggcgggcggacgucuagccagcgccagagagaccccgaaccugagccggaacccgagccugagggaggccggucccgcgccggggcccaaaacgaucagcugucuaccggacccagagcugccccugaagaggcugaaacacucgccgagaccgagcccgaacggcaccugggcagcuaccuucuggacuccgagaauacaucuggcgcgcucccgcgccugccucagacccccaagcagccucagaaaagaagccgggccgcuuuuucccauacacaagucaucgaacuggagcgcaaguucagccaccagaaauaucucucugcccccgaaagagcucaucuggccaagaaccuuaagcugaccgagacgcagguuaaaauuugguuucaaaaucggcgcuacaagaccaaaagaaagcagcucuccagcgagcugggggaucuugaaaaacacucuucccugcccgcgcucaaggaggaagccuucagccgggcuucucugguguccguguauaacagcuacccuuauuacccguaucuguacugcgucggauccuggucucccgccuuuugguga

SEQ ID NO: 3247 - RNA, 942 nt, Artificial Sequence
  BAG37303 variant
auggccagcuucagaaagcugacccucuccgagaaagugcccccuaaccacccgucucggaagaaagucaauuuucuggacaugagccuugaugacaucauuaucuacaaggaacuggagggcacaaacgcugaagaggagaaaaauaagcgccagaaccauuccaagaaagaaucucccagcagacaacaguccaaggcccaccggcaucgccacagacgggauuauucucgcugcagaagcaauuccgaggaagggaaccaugacaaaaagccuagccagaaacccucuggauucaaguccggccagcacccucucaaugggcaaccccugauugagcaggaaaaguguagcgauaacuacgaggcgcaggcugagaaaaaucagggacaaucugaaggcaaccagcaccaguccgaggggaauccugacaagagcgaagagucucagggacaaccggaagagaaccaucacuccgagcggagccgcaaucaucuugaaagaucccugucucagagcgaucggucccagggccaacucaaacgccaccacccccaguaugagagaagccauggccaguacaagcggucucacgggcaguccgaacgcagccauggacacucugagagaagccauggccacuccgaacggucucacgggcauagcgagagaucccacggacauagcaaacgcucucggucccaaggcgaccugguugauacgcagagcgaccugaucgccacccagagagaucucauugccacacagaaggaccugaucgcuacccaacgcgaucuuaucgccacacagcgggaccugauugugacccagagagaccucguggcuacagagcgcgaucugaucaaccagucugggcggucccacggacaaagcgaaagacaccagcgcuauuccaccggcaaaaauacgauuaccacauga

SEQ ID NO: 3248 - RNA, 942 nt, Artificial Sequence
  AAI28135 variant
auggccagcuucagaaagcugacccucuccgagaaagugcccccuaaccacccgucucggaagaaagucaauuuucuggacaugagccuugaugacaucauuaucuacaaggaacuggagggcacaaacgcugaagaggagaaaaauaagcgccagaaccauuccaagaaagaaucucccagcagacaacaguccaaggcccaccggcaucgccacagacggggguauucucgcugcagaagcaauuccgaggaaggaaaccaugauaaaaagccuagccagaaacccucuggcuucaaguccgggcagcacccucucaauggacaaccccugauugagcaggaaaaguguagcgacaacuacgaggcgcaggcugagaaaaaucagggccaaucugaagggaaccagcaccaguccgagggaaauccugauaagagcgaagagucucagggccaaccggaagagaaccaucacuccgagcggagccgcaaucaucuugaaagaucccugucucagagcgaccggucccagggccaacucaaacgccaccacccccaguaugagagaagccaugggcaguacaagcggucucacggacaguccgaacgcagccauggccacucugagagaagccaugggcacuccgaacggucucacggacauagcgagagaucccacggccauagcaaacgcucucggucccaaggggaucugguugacacgcagagcgaucugaucgccacccagagagaccucauugccacacagaaggaucugaucgcuacccaacgcgaccuuaucgccacacagcgggaucugauugugacccagagagaccucguggcuacagagcgcgaccugaucaaccagucuggacggucccacggccaaagcgaaagacaccagcgcuauuccaccggcaaaaauacgauuaccacauga

SEQ ID NO: 3249 - RNA, 384 nt, Artificial Sequence
  12543784 variant
augaucaagaaaaaccugaagaaacucggcauugaggaaaccuaccugaauaucauuaaggccaucuaugacagacccacagcuagcauucagaaaacggagaaccuuuccaccaagacagggaccucucaagaauaccaccugagcccucucugguucuauaucgugcuggagauccuugccuccacaauucggcaggaaaagaaucugaaagauauccauaccgagaaggaggaagucaaacucucucuguuugcggacgcuaugauucuguaccucaagaaaccgaacgauagcacacgcaagcugcuugagcugaucaagaaaauucacuccucuugcagaaucaagauuaauauccauuucgccuuuuguagccaguga

SEQ ID NO: 3250 - RNA, 1926 nt, Artificial Sequence
  AAA63226 variant
auggccaaggcugccgcgaucggcauugaccuggggaccacauacagcugcgugggagucuuccagcacggcaaaguugagaucauugcuaacgaucaagggaauagaacgacccccuccuauguggccuuuacagacaccgaacggcucaucggagaugccgcuaagaaccagguggcccugaauccucagaacacagucuucgacgcuaaacgccuuauuggcagaaaguuuggggauccggugguucagucugacaugaaacauuggcccuuccaagugaucaaugauggagacaagccuaagguccaggugagcuacaaaggcgagaccaaggccuuuuaucccgaagagaucuccucuaugguucugacaaaaaugaaggaaauugcggaggccuaccucggcuauccugugaccaacgcugucaucacggugcccgccuacuucaaugauagccagcggcaggcuaccaaagacgccggggugauugcgggacugaacguccuucgcaucauuaaugagccuacagccgcugccaucgcuuauggccuggauagaaccgggaagggagaacggaacguucucauuuuugaccugggcgggggaacauucgauguguccauccugaccaucgacgacggcauuuuugaggugaaggccacggccggcgauacacaccucgggggagaagacuucgauaaucgccuggucaaccauuuuguggaggaguucaaaagaaagcacaaaaaggacaucucucaaaauaaacgggcuguucgcagacuucggaccgcgugugaacgcgccaagagaacacugagcuccagcacccaggcuucucucgagauugauucccuguuugaaggcaucgacuucuacaccagcauuacacgggcccgcuucgaggaacuuugcucugaucuguuuagauccacgcucgagccgguggagaaagcccugcgggacgcuaagcuggauaaggcccagauccaugaccucguccugguugggggaagcaccagaauccccaaagugcagaaacuucugcaagauuucuuuaacggccgcgaccucaauaagucuauuaacccugacgaagcgguggcuuacggggccgccguccaggcugccauccugaugggagauaaguccgagaacgugcaggaccuucugcuccuggaugucgcuccccugagccucggccuggaaacagccggcggggugaugaccgcgcuuauuaaacggaauagcacaaucccuaccaagcaaacgcagauuuucacaaccuauucugacaaccagcccggaguucugauccagguguacgagggcgaaagagccaugaccaaggauaauaaccuccuggggcgcuuugagcuuagcggaaucccgccugcuccccggggcgucccucaaauugaggugacauucgacaucgaugccaaugggauucugaacguuaccgcuacagacaaauccacgggcaaggccaauaaaaucaccauuacaaacgauaagggaagacucagcaaagaagagaucgaacgcauggugcaggaggcggaaaaguauaaggccgaggacgagguccagcgggaaagagugucugcuaaaaaugcccuggaguccuacgcuuuuaacaugaaguccgccguggaagaugagggccugaaagggaagauuucugaggccgacaaaaagaagguucucgauaaaugucaggaagucaucagcuggcuggacgcuaauacccuugcggagaaggacgaguucgaacacaaacgcaaggaacuggagcaagugugcaaccccaucauuuccggacucuaucagggcgccgggggacccggcccugggggcuuuggagcucagggcccgaaagggggaucuggcagcgggcccacaaucgaggaaguggauuga

SEQ ID NO: 3251 - RNA, 1926 nt, Artificial Sequence; identical to SEQ ID NO: 3250
  AAA63227 variant

SEQ ID NO: 3252 - RNA, 627 nt, Artificial Sequence
  AAI21098 variant
auggcccugggccagaaacucuucaucaccaugagcagaggggcuggacggcugcaaggcacacuuugggcccugguguuucucgggauucuggucggaaugguugugcccuccccugcgggcacgcgcgcuaacaauacccuucuggacucuagaggguggggaacacuccugagccggucccgcgccggccuggccggcgagaucgcuggggugaacugggaaucuggauaccucgucggcauuaagagacagcggcgccuguauugcaauguggggaucggauuccaccuucagguucugccggauggcagaauuagcgggacccaugaggaaaaccccuacucccuccuggagaucucuacaguggaacggggagucgugagccuuuuuggcguucgcuccgcccuguucguggcuaugaauagcaagggcagacucuaugccaccccuucuuuucaggaggaguguaaauuccgggaaacacugcugcccaacaauuacaacgcguaugaguccgaccucuaccaagggaccuauaucgcccugagcaaguacggacgcgucaaaagaggcucuaagguguccccuauuaugacggugacccacuuucuuccccggaucuga

SEQ ID NO: 3253 - RNA, 1569 nt, Artificial Sequence
  BAA74724 variant
augcccagagccccucggugccgcgcugugagaagccugcuccggucccacuaccgcgagguccugccgcuugccaccuucguuagacggcugggcccccagggguggcgccucgugcaaagaggagacccugcggcuuuucgggcccugguggcccagugucuugucugcgugcccugggaugcucgcccucccccugccgcuccgucuuucagacagguuagcugucugaaggaacucguggcccggguccugcagcgccugugcgagagaggcgcgaaaaacgugcucgccuuuggguucgcucugcuugacggagcccggggcgggcccccugaagccuuuacaacguccguucgcucuuaucugcccaauaccgugacagaugcccucagaggaagcggcgcguggggccugcuucugcggagagucggggacgaugugcucgugcaucugcuggcccgcugugcucucuucguccugguugccccuuccugcgcuuaccaaguguguggacccccgcuuuaucagcugggcgccgccacccaggcucggccucccccucacgcgucugggcccagacgccggcucggaugcgagagagccuggaaccauagcgugcgcgaagcuggcgucccccuggggcuuccugccccgggagcccggagacgcggcggcuccgcuagccggucucugccccucccuaagagaccccgccggggcgccgcgccugagcccgagagaacaccggugggacagggcuccugggcucacccugggcggacccgcggacccagcgacagaggcuuuuguguugugucuccugcccggcccgccgaagaggcuacaucccuggaaggggcccugagcggaaccagacauucucacccuuccgucggccgccaacaccaugcugggcccccgagcacgucccggccucccagacccugggauaccccuugcccgcccguguacgccgagacaaaacacuuccucuauucuagcggggacaaggagcagcugcgcccuuccuuucuucugagcucucucagacccauccugaccggagcgcggcgccuuguugaaacaauuuuccugggcuccagcccugggugucagggacuccccgccggcugcccugcuugccccucugccaccgggaaauguggcccgugcuuuuggagcugucugggaacgacaagauccgcuccuaccggcugcucuagccggcgcacagccagaugugagcugcggagcccccagcaaccuguguccguccccgggcgcucuccgagagcgcucuggcggccuccccgcagacggacccagaccccuguggccuggugcuccuguagcgcuucuacagcuccccuggcuggagucagacuucgcgccggccugcccgccccugcuggggcgccgcggccccucggacugcaggcccaaagacgccgguuccugagaaauacgaagaaguuuaucucccuuggcaaacaugcuaagcucagccugcaggaacugaccuggaaaauguccgugcgcgauugcgccuggcuccggagaucuccu

SEQ ID NO: 3254 - RNA, 1680 nt, Artificial Sequence
  BAA23606 variant
augagacugcaccggcuccgcgccagacugagcgcuguggccugcggccuucugcuccugcuuguccgggggcagggacaagacuccgcgucucccauccgcaccacacauacgggccagguucuggggagccucgugcacgugaagggagcuaacgccggcguccagaccuuccuggggauuccuuuugccaaaccgccccugggaccucucagauucgcucccccugagcccccugaauccuggucuggcgugcgggauggcacaacccauccggccaugugucugcaggaccuuacagcuguugagagcgaauuucugucccaauucaauaugaccuuucccucugauagcauguccgaggacugccucuaccugagcaucuauaccccugcccacucucaugaaggguccaaccuucccgugauggucuggauucacggaggcgcgcugguguucgggauggccagccucuacgauggaucuaugcuggcugcccuggagaauguuguggucgugaucauucaguaucgccucggcgugcugggguuuuucuccacaggagacaagcacgcuacgggcaacuggggcuaccuugaucaggucgccgcgcugagauggguucagcaaaauaucgcccauuuugggggaaacccugaccgggugaccaucuucggcgagagcgcugggggaacaucuguguccagccucgucgugucccccauuucucagggccuguuucacggggccaucauggaaagcggaguugcccuucugccgggccucauugcuuccagcgccgaugugaucucuaccgucguggcuaaucuguccgcgugugaccagguugauagcgaggcccuggugggcugccuccgcgggaaaucuaaggaagagauucuggcuaucaacaaaccuuucaagaugauucccggagucguggacggcgucuuucuuccuagacauccccaggagcugcucgccagcgccgauuuccaacccgugccuuccaucguuggggugaauaacaaugaauuuggauggcugaucccgaaggucaugcggauuuaugacacacagaaagagauggaccgcgaggcuucucaggccgcgcuucaaaagaugcugacccuccugaugcugcccccuacguuuggcgaucuccugagagaggaauacaucggggacaacggcgauccccagacacuucaggcucaguuccaagagaugauggccgacagcauguuugugauuccugcccugcagguugcucacuuccaguguucccgggcccccguguauuuuuacgaguuccagcaccaaccgagcuggcucaaaaauauccgcccuccccauaugaaggcugaucacggagacgaacugccuuuugucuucagaucuuucuucggcgggaacuacauuaaauuuaccgaggaagaggaacagcugucccggaagaugaugaaguauugggccaauuucgcgagaaacggaaaccccaauggcgaggggcuuccucauuggccccucuuugaucaggaggaacaguaccugcaacugaaccuccagccggccgugggacgcgcucugaaagcccaccggcuucaguucuggaagaaagcucugccucagaagauccaagagcucgaagaacccgaagagagacauacagagcuguga

SEQ ID NO: 3255 - RNA, 1740 nt, Artificial Sequence
  AAH65269 variant
augaacaagcuguacaucggcaaucucagcgagaacgccgcucccuccgaccuggaaucuauuuucaaagaugccaagaucccugugagcgggccguuucuugucaaaaccggauaugcguucguugacugccccgaugaguccugggcucugaaggccauugaagcccucucuggcaaaaucgagcugcacgggaagccuauugaaguggagcauagcgugcccaagagacagcggauccgcaaacuucaaaucagaaauauuccuccccaccuucagugggagguccucgacucccugcuggugcaguacggaguuguggaaucuugugagcaggucaacacagauagcgaaacggcugugguuaaugugaccuauuccagcaaggaccaagcccggcaggcucucgauaaacugaacggcuuucagcuugagaauuucacacugaaggucgccuacaucccugacgagauggcggcccagcaaaacccgcuccagcagccccgcgggagacggggacugggccagcgcgggucuuccagacaaggcagcccuggaucuguguccaaacagaagcccugcgaucuuccucugcggcuccuggugcccacccaguuugucggcgcuauuaucgggaaggaaggagccacaauucgcaauaucaccaaacaaacacagagcaagauugacguucauagaaaagagaacgcuggcgccgcggaaaagucuaucaccauccuguccacgccggaggggaccagcgccgcuuguaaauccauucucgaaaucaugcacaaggaggcccaggauauuaaauucacagaggaaaucccucugaagauucuugcucauaauaacuuugugggacggcugaucggcaaggagggccgcaaucucaaaaagaucgaacaggacaccgauacaaaaauuaccaucucuccccugcaagagcuuacgcuguauaacccugaaagaacaauuaccgugaaggggaaugucgagacaugcgccaaagccgaggaagagaucaugaagaagauucgggaaagcuacgagaacgacaucgcuuccaugaaccuccaggcgcaccugauccccggacugaaucucaacgcccugggccuuuuucccccuaccagcgggaugccgcccccuaccucuggacccccuuccgcuaugacacccccguauccucaguucgaacagagcgagacggagaccgugcaccuguucauucccgcccucucuguuggcgccaucauugggaaacaaggacagcauaucaagcagcugagccgcuuugcuggcgccuccauuaaaaucgcgccugcugaagcccccgacgccaaggugagaauggucauuaucacaggcccucccgaggcucaguucaaagcccaagggcggaucuacggaaagauuaaggaagagaauuuugugucuccgaaagaggaaguuaagcuggaggcucacaucagagugccuagcuucgccgcgggccgcgucauugggaaaggaggcaagaccgugaacgaacugcagaaucucuccagcgccgaggucgugguuccccgggaucagacacccgacgaaaacgaucagguggucgugaaaaucaccgggcauuucuacgcuugucaaguugcccagagaaagauucaggagauccugacgcaagugaagcagcaccagcagcaaaaagcucugcagucuggcccuccgcagucccgccggaaguga

SEQ ID NO: 3256 - RNA, 537 nt, Artificial Sequence
  AAA63207 variant
augcacagcuccgcccugcucugcugucuggugcuucugaccggcgucagagcuucucccgggcagggaacacaaagcgagaacuccugcacgcauuucccuggcaaucucccgaacaugcugcgggaccuucgcgaugccuuuucuagaguuaagaccuucuuucagaugaaagaccagcuggauaaucuccugcugaaggaaagccuccuggaggacuucaaaggguaccuuggaugucaggcgcuguccgaaaugauccaauuuuaucucgaggaagugaugccccaggcugagaaccaggauccugacauuaaggcccacgucaauucucugggcgagaaccuuaaaacacugcggcuccgccugagacggugccaucgcuuccugcccugugaaaauaagagcaaggccguggaacaggugaaaaacgcuuuuaauaagcuccaagagaaagggaucuacaaggccauguccgaguucgauauuuuuaucaacuauauugaggcuuacaugaccaugaaaaucagaaauuga

SEQ ID NO: 3257 - RNA, 1143 nt, Artificial Sequence
  AAB17170 variant
auggccuucgugugccuggcuaucggcugucucuacaccuuucugauuagcacaacguucgggugcaccuccucuagcgacacagagaucaaggucaaucccccucaggauuuugaaauuguugacccgggauaucuuggcuaccuguaucuccaauggcagcccccucugucccuugaucacuucaaagaguguaccguggaauacgagcugaaguauagaaacaucgggucugaaacauggaaaaccauuaucacaaagaaccuccauuacaaagacggauuugaucugaauaagggcaucgaggccaagauucacacccugcuccccuggcagugcacgaacgggagcgaggugcaguccucuugggcggaaaccacauauuggaucagcccucaaggcauucccgagaccaaaguccaggacauggauuguguguacuacaauuggcaguaucugcuuugcuccuggaagccuggaaucggcguucugcucgacacaaacuacaaucuguucuauugguacgaagggcuugaucaugcucugcaguguguggacuauauuaaagccgauggacaaaacaucggcugccgguuuccguaccucgaggccagcgacuauaaggauuucuacauuugugucaaugggucuuccgagaacaaacccauccgcagcucuuacuuuaccuuccagcugcagaauaucgugaagccucugcccccuguuuaucucacguuuacaagagaauccagcugcgagauuaagcugaaauggucuaucccccuuggaccgauuccugcucgguguuucgacuacgaaaucgagauucgcgaagacgauaccacacuggugaccgccaccgucgagaacgagacauauacgcucaagaccacaaaugaaaccagacagcugugcuuuguggugcgguccaaagucaacaucuacugcagcgacgauggcaucugguccgaguggucugacaagcaauguugggaaggggaggaucuuagcaaaaagacacugcuccgcuucuggcugcccuucggauuuauucugauccucguuauuuucgugaccggccugcuucugagaaaaccuaauacguaucccaagaugauccccgaauuuuucugcgacacauga

SEQ ID NO: 3258 - RNA, 819 nt, Artificial Sequence
  AAA67527 variant
auggacagcuaccugcucauguggggccugcuuaccuucaucauggugcccgggugccaggccgagcugugugaugacgauccuccggaaauuccccacgcuacauuuaaggccauggcguauaaagagggaacgaugcucaacugcgaauguaagagaggcuuccggcgcaucaaauccgggucucuguacaugcuuugcaccggaaauagcucccauucuagcugggacaaccaaugucagugcacauccucugcuaccagaaauacaaccaagcaggucacaccucagcccgaggaacaaaaagagcggaagaccacggagaugcagagcccuaugcagcccguugaucaggccucccugccuggccacugucgcgaaccgcccccuugggagaacgaagccaccgagagaauuuaucauuuugugguggggcaaauggucuacuaucagugcgugcagggauaccgggcucuccaccgcggccccgccgagagcguuuguaagaugacacauggcaaaaccagauggacacagccucaacugaucugcaccggggaaauggagacgucucaguuccccggagaagagaagccgcaggcuuccccugaaggccggcccgagagcgagacaucuugucuggugaccacaaccgacuuucaaauucagaccgaaauggccgcgacaauggagacguccaucuucaccacagaauaucaggucgccguggcugggugcguuuuucuccugaucagcgugcuucugcucucuggacugaccuggcagcgcagacaacggaaaucccgcagaacaauuuga

SEQ ID NO: 3259 - RNA, 1656 nt, Artificial Sequence
  AAA59143 variant
auggccgcucccgcccugagcuggagacucccucugcuuauccugcuccugccgcuugcgaccuccugggcuucugccgccgugaacggcacaagccaguucacgugcuuuuacaauucccgggcuaacauuucuugugucuggagccaagacggggcccugcaggauaccuccugccagguucacgcuuggcccgaccgcagacgguggaaucagacaugugagcuccugccugugucucaagccagcugggcgugcaaccugauccucggagcccccgauucccagaagcugaccacaguggacauugucacccuucgcgugcuguguagagaaggcguucgguggcgcgugauggcuauccaggauuucaaaccuuuugagaaucucagacugauggcccccauuagccuucaggucgugcauguugaaacacaccggugcaacaucucuugggagaucucccaagcuagccauuauuucgaacgccaccuggaguuugaggccagaacccucucuccugggcauacgugggaagaggcgccgcugcugacccucaagcagaaacaggaauggauuugucuggagacacuuacccccgacacacaguacgaguuccaagugcgggucaagccucugcagggagaauuuaccacguggucccccuggagccagccucucgccuuccgcacaaaacccgcugcccugggcaaggauaccaucccguggcuugggcaucugcucgugggacugucuggcgcuuuuggcuucauuauccugguguaucuccugauuaauugcagaaacacagggccuuggcuuaagaaaguccugaaguguaauacccccgacccuuccaaauuuuucagccaacucuccucugagcacggaggcgauguucagaaguggcugagcucccccuuucccuccucuuccuucagcccugggggacuugccccggaaaucucuccccuggaggugcucgaacgggacaaagugacccagcugcugcuccagcaagauaaggucccugagcccgccagccuguccucuaaccacagccuuacauccugcuucacgaaucagggcuacuuuuucuuucaucugccugacgcucucgagauugaagcgugucagguguauuucaccuacgaucccuauagcgaggaagacccggacgaggggguugccggagcuccuacaggcucuagcccccagccucugcaaccccugagcggcgaagaugacgccuacugcaccuuuccuucucgcgaugaccuucuccuguucucccccagccugcucgggggaccguccccucccucuacagcccccggcgggagcggagcuggcgaggagagaaugccuccgucccugcaggaacgggugcccagagauugggacccucagccccuugggccucccaccccuggaguccccgaucugguggacuuucagccgccucccgagcucguucugcgcgaagccggcgaggaagugccugaugcgggcccccgggagggggucucuuucccguggagcagaccucccggacaaggcgaguuucgcgcucugaacgcccggcuuccucucaauacggacgccuaccugucccugcaggaacuccaggggcaggaucccacacaccugguguga

SEQ ID NO: 3260 - RNA, 1110 nt, Artificial Sequence
  AAA59145 variant
augcugaagcccagccucccuuucaccucccugcuuuuucugcagcucccgcugcuuggcguggggcugaacacaacgauccucacccccaauggaaacgaggacacaaccgccgauuucuuucugacaaccaugccuacagacucucugagcgucuccacccucccccugccugaaguucaaugcuucguguuuaauguggaguacaugaacuguacguggaacucuagcuccgaaccccagccuaccaaucuuacacugcacuauugguacaaaaauucugauaacgacaagguccagaaaugcagccauuaucucuucuccgaggaaaucaccagcggcugucagcugcaaaagaaagagauccaccuuuaccagacauuugugguucagcugcaggauccgagagagccccggcgccaagccacccagaugcucaagcugcagaaucuggugauuccuugggcccccgaaaaccucacgcugcauaaacuuucugagucccagcuggaacucaauuggaacaauagauuccugaaccacugccuugagcaucugguccaauaucggacagacugggaucacagcuggaccgagcagucuguggacuaccgccacaaguuuucccucccuagcguugaugggcagaagagauauacauuccgggugcgcucuagauuuaauccccuguguggauccgcgcaacauuggagcgaauggucccacccgauccauuggggcucuaacaccagcaaagagaacccuuuccuguuugcucucgaagccgucgugauuuccguggggagcaugggacugaucaucucucuucugugcgucuacuucuggcucgagcggaccaugccccgcauuccuacacugaagaaucuugaagaccugguuacggaguaccacggcaacuucuccgccuggagcggcgugucuaaagggcucgcugagagccugcagcccgauuauuccgaaagacugugucucgugucugagauucccccuaagggaggcgcccugggggaaggaccgggcgcuagccccugcaaucagcacuccccuuacugggcucccccuuguuauacccuuaagcccgagacauga

SEQ ID NO: 3261 - RNA, 405 nt, Artificial Sequence
  AAA74469 variant
augagaaugcugcuccaccugagccuucuggcccucggcgcugccuacguguaugcgauccccaccgagauuccuacauccgcucuggucaaggaaacgcuugcccugcucucuacccaucggacacugcugaucgccaacgagacccuccgcauuccgguucccgugcacaaaaaucaucagcugugcacagaagagaucuuccaagggauuggaacccuugaaagccagacagugcagggcgggaccgucgagagacuguuuaagaaccucucccugaucaaaaaguacaucgacggacagaaaaagaaguguggcgaggaacggcgcagagugaaucaauuccuugauuaucugcaggaguuucucgggguuaugaacacggaauggauuaucgagucuuga

SEQ ID NO: 3262 - RNA, 555 nt, Artificial Sequence
  AAH06487 variant
auggugagaaagcugaaauuccacgagcagaagcuccugaaacaagucgacuuucuuaacugggaaguuaccgaucauaaucugcacgagcuccgggugcugcgcagauaccggcuucagcgcagagaagacuauacacgguacaaccagcugagccgcgccgugagagagcucgcucggcgccugagagaucugcccgaacgggaccaguuccgcgucagagccuccgcggcucuccuggauaaacuuuaugcccugggccucgugccuacgcgggggucucuggagcuuugcgacuuuguuaccgccagcuccuucugucgcagacggcugccgacagugcuccugaagcugagaauggcucaacaucuccaggccgcugucgccuuuguggagcagggacacguucgcgugggccccgaugucgugaccgacccugcguuccuggugacacggucuauggaagauuuugucaccuggguugacagcuccaagaucaagagacaugugcuugaguacaaugaggaacgcgaugacuucgaucuggaggccuga

SEQ ID NO: 3263 - RNA, 3150 nt, Artificial Sequence
  AAH08786 variant
augggcagcagaacccccgagucuccccugcacgccgugcagcuccggugggggccgcgcagacggcccccucugcuuccccugcuccugcuucugcucccucccccuccgcgcgucggaggcuucaaccuggacgcugaagcccccgcgguucuguccgggccucccggcagcuuuuucggcuuuuccguggaguucuacagaccugggacagauggagugucuguccucgugggcgcucccaaggccaauacgagccaaccgggcguucugcaagggggagccguguaucuuugcccuuggggcgcuucccccacccaguguacaccuaucgaauuugacucuaaagggagccggcugcucgaguccagccugucuuccagcgaaggagaggagcccgucgaauacaagucucuucagugguucggcgccaccgugcgcgcucauggguccagcauucuggccugcgcgccccucuauucuuggagaacagagaaagaaccucuguccgauccgguuggaaccuguuaccugagcacagacaacuuuacccggauccucgaguaugcccccugccgcuccgauuucucuugggcugccggccagggcuacugucaagggggauuuagcgcugaguucacgaagaccggcagagugguccuugggggaccuggcuccuauuuuuggcaggggcagauucugagcgccacacaggaacagaucgcggagucuuacuaccccgaauaucugauuaaucucgugcagggacagcugcaaacccggcaggccuccagcaucuacgacgauucuuaucuuggcuacagcguggcugucggcgaguucuccggggacgauacagaagacuuuguugccggagugccuaaaggcaaccugaccuauggguacgugacgauccucaauggaucugauauucgcagccuguauaacuucuccggcgagcagauggcuagcuacuucggguacgccgucgccgcuacagacgugaauggcgauggacuggacgaccuccugguuggcgcgccccuucugauggauagaaccccggacgggcggccucaagaggugggacgcgucuauguguaccuccagcaccccgccggcaucgaaccuacacccacccugacccuuacagggcaugaugaguuuggaagauucggaucuucccugacgccucucggggaccuggaucaggacggcuauaacgauguugcuauuggagcccccuuuggcggggaaacccagcaaggaguggucuucguguuuccgggcgggccuggaggccuggggagcaagcccucucagguccuccagccccugugggccgcuucccacacaccugacuucuuuggcagcgcccuucggggaggcagagaucuggacgggaauggauacccggaucucaucgugggcuccuucgggguugacaaggcgguggucuaucgcggacggcccauugugucugcuagcgccucccugaccaucuuuccugccauguucaaccccgaggaaagaucuugcagccuggagggcaauccuguugcuuguauuaaccuuuccuuuugccucaaugccagcgggaaacauguggcugacucuaucggcuucacagucgagcugcagcuggauuggcaaaagcagaaaggaggcgugcgccgggcccucuuucuggcguccagacaggccacccuuacgcagacacugcucauccaaaacggggcucgcgaagacugucgggagaugaagauuuaccugagaaaugaaagcgaguuccgcgauaaacugucucccauccacauugcccuuaacuucucccucgacccucaggcucccguggauagccacggacugcggccggcccugcauuaucagucuaagagcagaaucgaagacaaggcgcagauucuccuggauugcggcgaggacaacaucuguguuccugaucuucaacuggaggucuuuggggaacagaaucacguguaccucggagacaaaaacgcccugaaucugaccuuccaugcucagaacgugggcgagggcggggccuacgaagcugagcuucgcgucaccgcucccccugaggccgaauauuccggacucgugcggcaccccggcaauuuuagcucucuguccugcgauuacuucgccguuaaccaaagcagacugcucgugugcgaccuggggaauccgaugaaggcgggagccucccuuuggggcgggcugcgguuuacagucccucaccuccgcgauaccaaaaagacaauccaguucgacuuucagauucugucuaaaaaccugaauaacagccaguccgacgugguuucuuucagacuuagcguggaggcucaagcccaggucacgcucaauggaguguccaagcccgaagccguucuguuuccugugucugauuggcauccccgggaccagccccagaaagaggaagaucugggcccugcuguccaccauguguaugagcucaucaaccaaggcccgagcuccauuagccagggggugcuggagcuuucuuguccccaggcccuggaaggacagcaacuccuguacgucaccagaguuacaggccugaauugcaccacaaaccacccuaucaaucccaaggggcuugagcuggacccugaaggaucccuccaucaccagcagaagcgcgaggcgcccagccggucuuccgcuagcucuggcccucaaauucugaaauguccggaagccgagugcuucagacuccgcugugagcuggggccccuucaccagcaggaaucccagagccugcaacuccauuuuagagugugggccaagaccuuccugcagcgggagcaccagccuuuuucccugcagugcgaagcuguguauaaagcccuuaagaugcccuaccgcauccugccuagacaacucccccagaaagagcggcaggucgcgacggcugugcaguggaccaaggccgaaggaagcuauggcguuccgcuguggaucauuauccucgccauucuguucggccuucugcuccuggggcugcuuaucuacauucuguacaagcucggauucuuuaaacgcucucugccuuauggcacagcuauggagaaggcccaacucaaaccucccgcuaccagcgaugccuga

SEQ ID NO: 3264 - RNA, 2397 nt, Artificial Sequence
  AAH20057 variant
augaaccugcagcccaucuucuggauuggccucaucagcuccgugugcugugucuuugcccaaaccgacgagaauagaugccugaaggcuaacgccaaaucuuguggggaaugcauucaggcgggaccuaauuguggcuggugcacaaacagcacguuccuucaggaggggaugccgaccuccgcucggugugaugaccuggaagcccucaagaaaaagggaugucccccugaugacaucgagaauccccgcggcucuaaagauauuaagaagaacaaaaauguuacaaacagaagcaaggggaccgccgaaaaacugaagccugaggacaucacacagauccaaccccagcagcuugugcugcggcuccgcuccggagagccucagaccuuuacacugaaauucaagagagcugaagauuacccgauugaccuguauuaccucauggaucugucuuauagcaugaaggacgaucuugagaaugugaaaucccugggcaccgaccucaugaacgaaaugcggcgcaucacgagcgauuuuagaauuggcuucgggucuuuugucgagaagaccgugaugcccuacaucuccacaaccccugccaaacugcggaaucccugcacaagcgagcaaaacugcaccucuccuuucuccuauaagaauguucuuagccugacgaacaaaggagaaguguuuaaugagcucgucggcaagcagcgcauuucugggaaccuggacucccccgaaggaggcuucgacgcuaucaugcaaguggccguuugugggagccugauuggauggagaaacgugacacggcuccuggucuuuuccaccgaugcgggcuuccacuuugccggcgacgggaaacuuggaggcaucgugcugccgaaugaugggcagugccaucucgagaacaauauguacacaaugucucacuauuacgacuacccuagcaucgcucaucuggugcagaaacuuuccgaaaacaauauucagaccaucuucgccgucaccgaggaguuccagcccguuuauaaggaacugaagaaccucauuccuaagagcgcugugggaacacugucugccaauuccagcaacgugauccaacugauuaucgaugcguacaauucucucagcuccgaggucauccuggaaaacggcaaacuuucugagggggugacgauuagcuauaaguccuacugcaaaaauggaguuaacggcaccggcgaaaaugggcgcaaguguagcaacaucucuauuggagacgaggugcaguuugagaucuccauuacaagcaauaagugccccaaaaaggauucugacuccuucaaaaucagaccccugggcuuuaccgaagaggucgaagugauccuccaguauauuugugagugcgaaugucagagcgaggggaucccugaguccccgaagugccacgaaggaaacggcacauucgaguguggggccugccgguguaacgaaggccgcguuggaagacauugcgaguguucuaccgaugaggugaauagcgaagacauggaugcuuacugccggaaagagaacuccucugaaauuugcagcaauaacggcgagugugucugcgggcaaugugugugcagaaagcgcgacaauacgaacgaaaucuauuccggaaaguuuugugagugcgacaauuucaacugugaucggagcaauggccugauuugcgggggaaacggcgucuguaaaugcagagugugugagugcaaucccaacuacacagggucugccugcgacuguucccuugauaccucuaccugcgaagcuagcaauggccagaucuguaacggacgcggcauuugcgagugugggguuugcaaguguacagacccuaaauuucagggacagaccugcgaaaugugucaaacaugccugggcgugugugccgagcacaaggaaugcguccagugccgggccuucaauaaaggggagaagaaggauacguguacccaggagugcuccuacuuuaacaucacaaaaguggaaagcagagacaagcucccccagccuguucaacccgauccggugucucacuguaaagagaaggacgucgaugacugcugguucuauuuuaccuacagcgugaacggaaauaacgaagugaugguucaugucguggagaauccugaaugucccacaggcccugauaucauucccaucguggcuggggucguggcgggcauuguucugaucggacuggcccuccugcuuauuuggaaacugcucaugaucauccacgaccgccgggaguucgcuaaguuugagaaagaaaagaugaacgccaagugggauaccggcgagaauccuauuuauaaauccgccgugacgaccgucgugaaccccaaguacgaagggaaauga

SEQ ID NO: 3265 - RNA, 2367 nt, Artificial Sequence
  AAA36122 variant
augggcaucgagcugcucugccuguucuuucuuuuccuggggagaaacgaccacgugcagggaggcugugcccucgggggagcugaaaccugcgaggauugucugcuuauuggcccccaaugcgccuggugugcgcaggaaaauuuuacacauccuagcggggucggagagcggugcgacacgccggcuaaccugcucgccaagggcugucagcugaauuucaucgaaaaccccguuucccagguggagauucugaaaaauaagccucucucugugggccgccaaaagaacagcuccgauaucguccagauugcuccccagucucugauccuuaagcugagaccugggggagcccagacccuccaagugcacguucggcagacagaggacuaccccguggaucuguauuaccuuauggaccugagcgccuccauggaugacgaucucaauaccaucaaagaacugggcucucgccugagcaaggagauguccaagcucacaagcaacuuuagacugggguucggaucuuuugucgaaaaaccuguguccccguucguuaagaccacacccgaggagauugcuaauccuugcagcucuauccccuauuuuugucuuccuaccuucggcuuuaaacauauucugccccucacgaacgacgccgaacgguucaaugagaucgugaagaaccagaaaauuuccgcgaauaucgauaccccggaagggggauuugacgccauuaugcaggcugccgucugcaaggagaagaucggcuggcgcaacgauagccugcaccuucugguguucgugucugacgcugacucccauuucggcauggauagcaaacucgccgggaucgucauuccuaaugacggacugugucaccuggauuccaagaacgaauacucuaugagcacaguucucgaguaucccaccaucggccaacugauugacaaacuugugcagaacaaugugcugcucaucuuugcggucacacaggagcaagugcaccuguacgaaaacuaugccaaacuuauuccuggggcuaccguuggacugcuccagaaagauuccggcaauauccugcagcugaucauuagcgccuacgaggaacucagaucugagguggaacuggagguccuuggggacacggagggacugaaccucuccuucacagcuaucugcaauaacggcacccuguuucagcaucaaaagaaaugcagccacaugaaggugggcgauacagccucuuucagcguuaccgugaauauuccccauugugaacggcgcuccagacacaucauuaucaagcccgucgggcugggagacgcccuugagcuccuggugucuccugaaugcaacugugauugccagaaagaggucgaagugaauagcuccaagugucaccauggcaacgggagcuuucagugcggaguuugugcuugccacccgggccauauggggccccggugugagugcggcgaggacaugcugucuaccgauuccuguaaagaagcgccugaccaccccagcugcucuggacgcggcgacugcuacugugggcagugcaucugucaucucuccccuuauggaaauauuuacggccccuauugccaaugugauaacuucagcugcgugagacacaaggggcugcuuuguggaggcaauggggacugcgauuguggcgagugcgucugucgguccggauggacaggcgaauacugcaacugcacgaccucuacagacagcuguguguccgaggaugggguucugugcucuggacgcggcgacugugugugcgggaaaugugucugcaccaauccgggagccagcggcccuacaugugagagaugccccaccuguggggauccuugcaacuccaagcggagcuguaucgaaugccaccucucugcugccggccaggccagagaggaaugcguggacaaguguaaacuggcuggagccacgauuuccgaggaagaggauuuuagcaaggacggcucuguguccugcagccugcagggggagaacgaaugucuuaucacauuccucauuaccaccgauaaugagggaaaaacaaucauucauucuaucaacgaaaaggacugccccaaaccucccaauaucccgaugauuaugcugggcguuagccuggcgauccuccugauuggggucgugcuucuguguaucuggaagcuccugguguccuuucacgaucgcaaggaggucgcuaaauucgaagccgagcggagcaaggccaaauggcagaccggaacaaacccucuguauagaggcucuacguccaccuuuaagaaugugacauacaaacaucgcgagaagcaaaagguugaccuuagcaccgacugcuga

SEQ ID NO: 3266 - RNA, 786 nt, Artificial Sequence
  EAW71937 variant
augugggaccuggugcucagcaucgcccuguccgucggcugcaccggggcuguuccccuuauucagucuagaaucgugggaggcugggagugugaaaagcacagccaaccuuggcaaguggccgucuacucccaugggugggcgcacugcggaggcgugcugguucauccgcagugggugcucacagcugcccacugucugaaaaagaacucucaggucuggcuugggcggcauaaucuguucgagcccgaagauacgggacagcgcgugccuguuagccacuccuuuccccacccucucuauaacaugucucugcugaaacaucagagccucagacccgacgaggauuccagccacgaccugaugcuucugcggcucucugaaccugccaagauuaccgauguggucaaagugcugggccuuccgacacaggagcccgcucugggcaccacaugcuacgccuccggguggggaagcaucgagccugaagaguuccuccgccccagaucucugcagugugugucccugcaucuccugagcaaugacaugugcgcucgggccuauucugaaaaggucaccgaguuuaugcuuugugcgggccuguggacagggggaaaggauaccugcggcggggacuccggaggcccucucguuuguaacggcgugcugcaagggauuacgagcuggggacccgagccgugcgcccuuccugaaaaacccgcuguguacaccaaggucgugcacuaucgcaaauggaucaaggauacaaucgccgcuaauccuuga

SEQ ID NO: 3267 - RNA, 672 nt, Artificial Sequence
  EAW71938 variant
augugggaccuggugcucagcaucgcccuguccgucggcugcaccggggcuguuccccuuauucagucuagaaucgugggaggcugggagugugaaaagcacagccaaccuuggcaaguggccgucuacucccaugggugggcgcacugcggaggcgugcugguucauccgcagugggugcucacagcugcccacugucugaaaaagaacucucaggucuggcuugggcggcauaaucuguucgagcccgaagauacgggacagcgcgugccuguuagccacuccuuuccccacccucucuauaacaugucucugcugaaacaucagagccucagacccgacgaggauuccagccacgaccugaugcuucugcggcucucugaaccugccaagauuaccgauguggucaaagugcugggccuuccgacacaggagcccgcucugggcaccacaugcuacgccuccggguggggaagcaucgagccugaagaguuccuccgccccagaucucugcagugugugucccugcaucuccugagcaaugacaugugcgcucgggccuauucugaaaaggucaccgaguuuaugcuuugugcgggccuguggacagggggaaaggauaccugcggcguuucccacccuuacagccaacaccucgaggggaaaggauga

SEQ ID NO: 3268 - RNA, 189 nt, Artificial Sequence
  BAF98781 variant
augagccugcucaagcaccagucccugagacccgacgaggauucuagccaugaccuuaugcugcuccggcuguccgaaccugccaaaaucaccgauguggucaagguucuuggccugccgacacaagagcccgcucucgggacgaccugcuacgccucuggauggggcagcauugaaccugaggaauga

SEQ ID NO: 3269 - RNA, 735 nt, Artificial Sequence
  BAG62239 variant
augggcacccugugggggugccccggagccccuccggugggcgcucacagcuguccccucccuaaggaggucuccagaacacuggggucuggagaaggcauggccguuagccaucggaacaauuccgggaugcuucccccuggaucucugcuccgcaacagccagguguggcugggcagacacaaucuuuucgagcccgaagacacgggccggcgcgugccugucucccauucuuuuccgcacccccuguacaacaugagccuccugaaacaucaaucccugagaccugaugaggacagcucucacgaucucaugcugcuucggcuguccgaacccgcgaagaucaccgacgugguuaaagugcucgggcugccuacacaggagcccgcucuuggaaccacaugcuaugccagcggcugggggucuauugagccggaagaguuccugcgcccuagaucccuccagugugucagccugcaucugcucucuaaugauaugugcgcccgggcuuacuccgaaaaggugaccgaguuuaugcugugugccggacuuuggacaggcgggaaagauaccugcggaggcgacagcggcgggccccugguuuguaacggagugcuccagggcaucacguccugggggccugagcccugcgcucugcccgaaaagccugccgucuauaccaagguggugcacuaccgcaaauggauuaaggacacaaucgcggccaauccguga

SEQ ID NO: 3270 - RNA, 786 nt, Artificial Sequence; identical to SEQ ID NO: 3266
  AAA74454 variant

SEQ ID NO: 3271 - RNA, 150 nt, Artificial Sequence
  AAR10469 variant
augugggaccuggugcucagcaucgcccuguccgucggcugcaccgggauugcuagaucuggauggguuggcacaacgugucuuagccugaagacccaggcccgggggucccucucugcgacagcuagccacacccgcuccacaaucuga

SEQ ID NO: 3272 - RNA, 543 nt, Artificial Sequence
  AAR10468 variant
augugggaccuggugcucagcaucgcccuguccgucggcugcaccggggcuguuccccuuauucagucuagaaucgugggaggcugggagugugaaaagcacagccaaccuuggcaaguggccgucuacucccaugggugggcgcacugcggaggcgugcugguucauccgcagugggugcucacagcugcccacugucugaaaaagaacucucaggucuggcuugggcggcauaaucuguucgagcccgaagauacgggacagcgcgugccuguuagccacuccuuuccccacccucucuauaacaugucucugcugaaacaucagagccucagacccgacgaggauuccagccacgaccugaugcuucugcggcucucugaaccugccaagauuaccgauguggucaaagugcugggccuuccgacacaggagcccgcucugggcaccacaugcuacgccuccggguggggaagcaucgagccugaagaguguacccccggcccugacgggguggcuggaucucccgaugccugggucuga

SEQ ID NO: 3273 - RNA, 765 nt, Artificial Sequence
  EAW71943 variant
auggccaccgcuggcaaccccugggggugguuccugggauaccucauccugggcguggccgggagccuugucuccggaucuugcagccagauuaucaauggcgaggacuguuccccucacucucaaccguggcaggcggcucugguuauggaaaacgagcucuuuugcagcggggugcuggugcauccccaguggguccuuuccgccgcccacuguuuccaaaauucuuauacaauuggacugggccuccauagccuggaagcugaucaggagccuggcucccagaugguggaagccagccugucuguuagacaccccgaguacaaccggccucuccuggcuaaugaccuuaugcugaucaagcucgaugaguccgugagcgaaucugacacgauucgcuccaucagcaucgccucucagugccccaccgcggggaacuccugucuggucagcggauggggccuucuggccaaugggagaaugccuacagugcuccagugcguuaacguguccgucgugucugaggaaguguguagcaaacuguaugauccgcuguaccaucccuccauguuuugcgcuggaggcgggcaagaccagaaggauagcuguaauggagacucuggcggcccucucauuugcaacggguaucugcagggacuugucuccuucggcaaagcccccugugggcagguuggagugccuggcguguacaccaaucugugcaaguuuacagaguggaucgagaaaaccguccaagcuagcuga

SEQ ID NO: 3274 - RNA, 228 nt, Artificial Sequence
  AAX30051 variant
auggccaccgcuggcaaccccugggggugguuccugggauaccucauccugggcguggccgggagccuugucuccggaucuugcagccagauuaucaauggcgaggacuguuccccucacucucaaccguggcaggcggcucugguuauggaaaacgagcucuuuugcagcggggugcuggugcauccccaguggguccuuuccgccgcccacuguuuccagaaguga

SEQ ID NO: 3275 - RNA, 588 nt, Artificial Sequence
  AAL14782 variant
auggccaccgcuggcaaccccugggggugguuccugggauaccucauccugggcguggccgggagccuugucuccggaucuugcagccagauuaucaauggcgaggacuguuccccucacucucaaccguggcaggcggcucugguuauggaaaacgagcucuuuugcagcggggugcuggugcauccccaguggguccuuuccgccgcccacuguuuccaaaauucuuauacaauuggacugggccuccauagccuggaagcugaucaggagccuggcucccagaugguggaagccagccugucuguuagacaccccgaguacaaccggccucuccuggcuaaugaccuuaugcugaucaagcucgaugaguccgugagcgaaucugacacgauucgcuccaucagcaucgccucucagugccccaccgcggggaacuccugucuggucagcggauggggccuucuggccaauggggagcucacaggagugugccugccuuccucuagacggagcuccgcucagagccgcggccugacccaaucuuccgccagccaggcugaaugucucccgugcuguucugccuga

SEQ ID NO: 3276 - RNA, 480 nt, Artificial Sequence
  AAL14781 variant
auggccaccgcuggcaaccccugggggugguuccugggauaccucauccugggcguggccgggagccuugucuccggaucuugcagccagauuaucaauggcgaggacuguuccccucacucucaaccguggcaggcggcucugguuauggaaaacgagcucuuuugcagcggggugcuggugcauccccaguggguccuuuccgccgcccacuguuuccaaaauucuuauacaauuggacugggccuccauagccuggaagcugaucaggagccuggcucccagaugguggaagccagccugucuguuagacaccccgaguacaaccggccucuccuggcuaaugaccuuaugcugaucaagcucgaugaguccgugagcgaaucugacacgauucgcuccaucagcaucgccucucagugccccaccgcggggaacuccugucuggucagcggauggggccuucuggccaauggguga

SEQ ID NO: 3277 - RNA, 765 nt, Artificial Sequence
  AAD21580 variant
auggccaccgcuggcaaccccugggggugguuccugggauaccucauccugggcguggccgggagccuugucuccggaucuugcagccagauuaucaauggcgaggacuguuccccucacucucaaccguggcaggcggcucugguuauggaaaacgagcucuuuugcagcggggugcuggugcauccccaguggguccuuuccgccgcccacuguuuccaaaauucuuauacaauuggacugggccuccauagccuggaagcugaucaggagccuggcucccagaugguggaagccagccugucuguuagacaccccgaguacaaccggccucuccuggcuaaugaccuuaugcugaucaagcucgaugaguccgugagcgaaucugacacgauucgcuccaucagcaucgccucucagugccccaccgcggggaacuccugucuggucagcggauggggccuucuggccaaugggagaaugccuacagugcuccagugcguuaacguguccgucgugucugaggaaguguguagcaaacuguaugauccgcuguaccaucccuccauguuuugcgcuggaggcgggcacgaccaaaaggauagcuguaauggagacucuggcggcccucucauuugcaacggguaucugcagggacuugucuccuucggcaaagcccccugugggcagguuggagugccuggcguguacaccaaucugugcaaguuuacagaguggaucgagaaaaccguccaggcuagcuga

SEQ ID NO: 3278 - RNA, 2673 nt, Artificial Sequence
  AAC83230 variant
augagccagggcauccuguccccucccgccgggcugcugucugacgaugacguggucguuagcccgauguucgaguccaccgcugccgaucuuggaucuguggugagaaagaaccugcucagcgacugcuccgucgugucuacaagccuggaagauaaacaacagguucccuccgaggacagcauggaaaaggugaaagucuaccuucgggugcgcccucugcuccccucugagcuggaaagacaggaggaucagggcuguguucggauugagaauguggaaacgcugguccuccaagcgccuaaggacuccuuugcucugaaaagcaacgagcgcgggaucggacaggccacccacagauucacauuuucucagauuuucggccccgaaguggggcaggccuccuuuuucaaucuuaccgugaaggagauggucaaggauguucugaaaggacaaaacuggcucaucuauacauacggcgugaccaauagcggcaagacacauaccauucaggggacgaucaaagacggaggcauccugccucggucucuugcucugauuuuuaacucccuccaggggcagcugcacccgacccccgaucugaagccucuccugagcaaugaggugaucuggcuugacuccaaacaaauucgccaggaagagaugaagaagcugucucuccugaacggaggccuucaggaagaggaacugagcacaucccucaaaagaagcgucuauaucgagucucggauugggaccuccacauccuucgauucuggaaucgccggccugagcuccauuucucaaugcaccagcuccagccagcuggacgagacgucucaucgcugggcucagcccgacacagccccucuccccgugccggcgaauaucagauuuuccaucuggauuagcuucuuugaaaucuacaacgagcugcuuuaugaucugcucgaaccucccucucagcaacggaagcgccagacccugagacuuugugaggaccagaauggcaacccuuacguuaaagaucugaauuggauucacgugcaggacgccgaagaggcuuggaagcuccugaaagucgggcggaagaaccaauccuucgccagcacacaucugaaucagaacuccucucgcagccacuccaucuuuucuauuagaauccuccaucugcagggagagggcgauaucgugcccaaaauuagcgaacuuucccugugcgaccucgcugggagcgagcgguguaaggaucagaagucuggagaaagacugaaagaggccggcaacaucaauaccucccugcacacccuugggcgcugcauugcggcccuccggcaaaaccagcagaauagaagcaagcagaaccugguucccuuccgcgacucuaaacugacacggguguuccaaggauuuuucacgggcagaggccgcuccuguaugaucgucaaugugaacccuugcgcuagcaccuaugaugaaacacuccacgucgccaaguuuucugcuauugccagccagcuggugcaugccccgcccaugcagcuuggguucccuucccugcacagcuuuaucaaagagcacucucuccaaguuucccccagccuggagaagggagcuaaggcggacaccggccuggaugacgacaucgaaaaugaggccgauauuuccauguacgggaaagaagaacuucuccagguggucgaggcuaugaagacacugcugcucaaagaacggcaggagaagcugcagcuugaaaugcaucugagagacgagaucuguaacgaaaugguggagcaaaugcagcagcgcgagcaguggugcucugaacaccucgauacccaaaaagagcugcuggaagagauguacgaagagaaacuuaauauucucaaggagagccugacguccuucuaucaggaagagauccaggaacgggacgagaaaauugaggagcuggaggcccuccugcaggaagccagacaacagucuguugcucaucagcaaagcggauccgagcuugcccugcgccggucucagagacucgcggcuagcgccuccacacagcagcugcaagaagugaaggccaaacugcagcaguguaaggcugagcuuaacagcaccaccgaggaacuccacaaauaccagaagaugcuggagccucccccgucugccaagccuuuuacaaucgaugucgacaaaaagcuggaagagggccaaaagaauauucggcuccugcgcaccgaacuucagaagcugggggagucccuccagagcgcugagagagccugcugccauucuacaggcgcgggaaaacugcggcaggcccugacgaccugugaugacauccuuaucaagcaagaucagacacuggcugaacuccagaacaauauggugcuggugaaacucgaccugagaaagaaggccgcuugcauugccgagcaguaucacaccguucuuaaacugcaaggccaggucuccgcgaagaaacgccucgggacaaaccaggaaaaucaacagcccaaccagcagccucccggaaagaaaccuuuccugcggaaccugcuucccagaaccccgacgugucaaagcucuaccgauugcuccccuuacgcccgcauccugagaagccggcgcagcccccuccucaagagcggccccuuugggaagaaauauuga

SEQ ID NO: 3279 - RNA, 1113 nt, Artificial Sequence
  AAH34621 variant
auggccaucacccuggaggaagcucccuggcucggcuggcugcuugugaaggcccugaugagauucgcguuuauggucguuaacaaucucguggcuauuccuagcuacaucugcuaugugauuauccugcagccgcuucggguccuggacuccaaacgcuucugguacauugaggggaucauguauaaguggcuccugggaaugguggccucuuggggcugguacgccggguauacaguuauggaauggggagaggauaucaaagcugugagcaaggacgaagccgucaugcuggugaaccaccaagcuacgggcgauguuuguacccucaugaugugccugcaggacaaagggcuuguggucgcccagaugauguggcugauggaucauauuuuuaaguacacaaauuucggaaucgugucccucgugcacggcgacuuuuucauuagacagggccggucuuaucgcgaucaacagcugcuucugcucaagaaacaucuggagaacaauuacagaagccgggaccgcaaguggaucguccuguuucccgaagggggauuccucagaaaacggcgcgagaccucccaggcguuugccaagaaaaacaaucugccuuuccuuacaaacguuacccugcccagaucuggcgcuacaaagauuauccucaaugcccugguggcucagcaaaagaacgggagcccugccggaggcgaugcgaaagagcuugacuccaagagcaaagggcugcaguggauuaucgauaccacgaucgccuaccccaaggcugaaccuauugacauccagaccuggauucucggauaucggaaaccgacagugacccacguccauuaccgcaucuuucccauuaaggaugugccucuggagacagacgaccugaccacguggcucuaucagagauucguugagaaagaagaucugcuuucucacuuuuacgagacaggcgccuuucccccuuccaagggccacaaggaagcugugagccgggagaugacccugucuaaucucuggaucuuccugauccaauccuucgccuuccuuagcggguauaugugguacaacauuauccaguauuuuuaccauugucuguucuga

SEQ ID NO: 3280 - RNA, 2178 nt, Artificial Sequence
  AAH14924 variant
auggccauggacagcucccugcaggcuagacucuuccccggccuggccaucaagauucaacggucuaacgggcuuauccacagcgcgaaugugcgcaccgucaaccuggagaaauccugcguuucuguggaaugggcugagggaggcgccacaaaggggaaagaaauugauuuugacgauguggccgcuaucaauccugagcuccugcagcuucugccgcuccaucccaaggacaaccugccucugcaggaaaaugucacgauucagaaacaaaagagacggagcgugaacuccaagauccccgccccuaaagagucucuccgcagcagauccacccggaugagcacaguuucugagcugcgcaucaccgcucaggaaaaugauauggagguggaacuucccgccgcggccaacuccagaaagcaguucagcgucccuccggcucccacacggccuucuugucccgccguggcugagauuccucugcgcaugguuuccgaggaaauggaggaacaggugcacagcaucagaggaucuuccagcgccaaucccgucaacuccgugcggcgcaaaucuugccucgugaaggaggucgaaaagaugaagaauaagagagaggagaaaaaggcgcaaaacagcgaaaugcggaugaaacgcgcccaggaguacgacuccagcuuuccgaauugggaguucgcuagaaugauuaaggaguuucgggccacccuggaaugucauccucuuacaaugaccgaucccaucgaggagcacagaauuugcguuugugugcgcaaacggccucugaacaagcaggaacucgcuaaaaaggagaucgacgugauuucuauccccuccaagugccugcugcucguccaugaacccaaacugaagguggaucuuacgaaauaucuggagaaucaggccuucuguuuugacuucgccuuugaugaaaccgcuagcaacgagguuguguacagauucacagcgcgcccucucguccaaaccaucuuugagggcgggaaggccacaugcuucgcuuauggacagaccggcucuggcaaaacgcacacaaugggaggggaccugagcggcaaggcccagaacgccuccaaggggauuuacgcuauggccucucgggauguguuucuucugaaaaaucaaccguguuauagaaagcucggacuggaaguuuacgugaccuucuucgagaucuauaacggcaaacuguuugaccuccugaauaagaaagcgaaacuucgcguccuggaagacgggaagcaacaggugcaggucgugggacuccaggagcaccugguuaacagcgcugaugacgugauuaaaaugaucgauaugggcuccgccugccggacaagcggccagaccuucgccaauucuaacuccagcagaucucaugcuuguuuucagauuauccuucgcgccaaggggcggaugcacggaaaauucucccuggucgaccucgcuggcaaugagagaggggccgauaccagcuccgcggaccgccagacacggauggaaggagccgagaucaacaagucucugcuggcucucaaagaaugcauuagagcccugggccaaaauaaggcucauacgcccuuucgggagagcaaacuuacccaggugcugcgcgauuccuucaucggggaaaacucuagaacaugcaugauugccaccaucagcccuggaauuuccagcugugaguacacacucaauacccugcgguacgcggacagaguuaaggagcugucuccccacuccggcccuagcggcgaacagcuuauccagauggagacggaagagauggaagccugcucuaacggggcucucauccccggaaaucuguccaaggaggaggaagaacugagcucucaaaugagcuccuuuaacgaagccaugacacagauucgcgagcucgaagagaaagcuauggaggaacugaaggagaucauucagcagggcccggauuggcuugaacugagcgagaugaccgagcaaccugacuaugaucucgaaaccuucgugaauaaagccgagucugcccuggcucagcaggcgaagcacuuuuccgcccugcgggacgucaucaaagcucuuagacucgccaugcaacuggaggaacaggccagccgccagauuuccucuaagaagagaccccaguga

SEQ ID NO: 3281 - RNA, 342 nt, Artificial Sequence
  AAH62223 variant
augaacuucuaccugcuccuggccagcuccauccuuugcgcucugauuguguuuuggaaguauagacgguuccagcgcaauaccggcgagaugucuagcaacuccacagcccucgcgcuggucagacccucuagcuccgggcuuaucaauucuaacacggacaauaaccuggcuguuuacgaucucagccgggacauucugaauaacuuuccucacuccaucgcccgccaaaaacggauucuggugaaucucagcaugguggaaaacaagcuggucgagcuugaacauacccugcucucuaaaggauucagaggcgccuccccgcaccgcaagagcacauga

SEQ ID NO: 3282 - RNA, 2583 nt, Artificial Sequence
  AAA56833 variant
augggccccuggggguggaagcugagauggaccguggcccuccugcuugcugccgcgggaacagcugucggcgaccggugcgagcgcaacgaguuccagugucaagaugggaaaugcaucagcuacaaguggguuugugacggauccgccgaaugccaggauggcucugacgaaagccaggagacgugucuguccgugaccugcaaaucuggggauuuuagcuguggaggcagagugaaucggugcauuccucaguucuggcgcugugacggccaagucgauugcgacaacggguccgaugaacagggauguccgcccaagacaugcucucaggacgaguuuagaugccacgauggcaaauguaucagccggcaguucgugugcgacuccgaucgcgacugucucgacgggagcgaugaggccucuugcccuguucugaccuguggacccgcuuccuuucaaugcaauagcucuacauguauuccucagcuuugggccugcgacaacgaucccgacugugaagauggcuccgacgaguggccucagagaugccgggggcuguauguguuccagggagauagcucuccguguuccgcuuuugaguuccauugccucagcggcgaaugcauccacuccucuuggcgcugugacggcgggcccgauugcaaggacaagagcgaugaggaaaauugugccgucgcgaccugcagaccugacgaguuucaauguuccgacggaaacugcauucauggcagccggcagugugaucgcgaauacgacugcaaagauaugucugacgaggugggguguguuaaugugacacugugcgaaggacccaacaaguucaaaugucacuccggcgagugcaucacccuggauaaggucugcaauauggccagagacugucgggauuggagcgacgagccuaucaaagaaugcgggacgaacgagugucucgauaauaacggaggcugcucucauguguguaaugaccugaagauuggcuaugaaugccuuugucccgauggguuucagcugguggcucaacgcagaugcgaggacaucgaugaaugucaggacccggauaccugcagccagcucugugucaaccuggagggaggcuacaagugccagugcgaggaaggguuccaacuugacccucacacaaaagccuguaaggcuguuggauccauugccuaucuguuuuucaccaaucggcacgaggugagaaaaaugacacucgaccgcucugaauacaccagccugauccccaaccugcggaacguggucgcgcucgauacggagguggccuccaauagaauuuauuggagcgaccugucucagcgcaugaucugcuccacacagcuugaucgggcucauggcguuagcucuuacgacaccgugauuuccagagauauccaggccccugacgggcuggcugucgauuggauccacagcaacauuuacuggacagacuccgugcucggcaccguuucuguggccgauaccaagggagucaaacgcaagacacuguuccgggaaaauggcagcaaacccagagccaucguggucgaccccgugcauggguuuauguauuggacggauuggggaaccccugcuaagauuaagaaaggcgggcuuaacggaguugacaucuacucccuggugacagagaauauucaauggccgaacggcaucacccucgaccugcugucugggcgccucuauugggucgauagcaagcugcacuccaucagcucuauugacgugaauggcggaaaccggaaaacaauccuugaggaugaaaagagacuggcgcaccccuucucccucgccguuuuugaggacaaaguguucuggaccgauauuaucaaugaagcuauuuuuagcgccaaccgccugacgggcucugacgucaaucuucuggccgagaaccuccuguccccugaggauauggugcuguuccauaaucucacacagcccagaggggugaacuggugugaacggaccacccugagcaauggaggcugccaguaccuuugucugccugcuccccagaucaacccgcacucuccuaaguuuacaugcgccugucccgacgggaugcuccuggcgcgggauaugcgcagcugccugaccgaggcugaagccgccguugcuacacaagagacguccaccgucagacuuaaggugagcucuacagccgugcggacccagcauacaaccacgagaccuguccccgacaccucccgccucccuggagcuacacccggccugaccacaguggaaaucguuaccaugagccaccaggcccugggggauguggcgggccggggaaacgagaaaaagccguccucugucagagcccucagcauugugcugccuaucguucuucugguguuccucugucugggcgucuuucugcuuuggaaaaauuggcgccucaagaacauuaauuccaucaacuucgacaaucccguguaucagaaaacgacagaggacgaaguucauauuugccacaaccaagauggguacucuuaucccagcagacagauggugucccuggaggacgaugucgcuuga

SEQ ID NO: 3283 - RNA, 1302 nt, Artificial Sequence
  CAA70989 variant
augguguggaaggucgccguuuuccugagcguggcucucggcaucggggccgugcccauugacgauccugaggacggaggcaaacacugggucgugaucguugcgggguccaacggaugguacaauuauagacaucaggcugaugccugccacgccuaccaaauuauccaucggaacggcauuccggacgaacagaucguggucaugauguaugaugacaucgcuuacucugaggauaaucccaccccugggauugugaucaaccgccccaauggaacagacguuuaucagggcgugccuaaggauuacacgggcgaagacgucacaccccagaacuuucuggccgugcuuagaggggaugcugaggccgugaaaggaauuggcagcgggaagguccugaaauccggaccucaagaccacguuuucaucuauuuuaccgaucauggcucuaccgggauucucguguucccgaaugaagaccugcacgugaaggaccuuaacgagacaauccacuacauguacaagcauaaaauguaucggaagauggucuuuuacauugaggcgugugaaagcggauccaugaugaaucaucugcccgauaacaucaauguguaugccaccacagcugccaacccucgcgagucuagcuacgcuugcuauuacgacgagaaaagauccaccuaucucggcgauugguacagcguuaauuggauggaggacucugauguggaggaccugacgaaggaaacccugcacaaacaguaccaccucgucaagucccacacaaacaccagccaugugaugcaguauggcaauaagacaaucucuaccaugaaaguuaugcaguuccaagggaugaagcggaaagccuccagccccgugccucugcccccggucacgcaccuugaucugacaccuucucccgacgugccucucaccauuaugaagcgcaaacugaugaacacaaacgaucuugaggaauccagacagcugaccgaggaaauccagcggcaucucgacgcgcgccaccugauugaaaagagcgucagaaaaaucgugucccugcucgccgcuucugaggccgaaguugagcagcugcuuagcgaacgggcuccccugaccggacauuccuguuaccccgaggcccuccugcacuuucgcacacacugcuucaauuggcauagcccuacguaugaauacgcccuuagacaccuguaugugcucgucaaccugugugagaagccguacccccugcaucggauuaagcucucuauggaucacgugugccugggccacuauuga

SEQ ID NO: 3284 - RNA, 1797 nt, Artificial Sequence
  AAL36991 variant
augacccccaucgugacaguccugauuugccucggccugagccuugggccuagaacgcacguucagaccggaacaaucccgaagcccacccugugggccgagccugacuccgugauuacacaaggcucucccgugacccucagcugucaggggucccuggaagcucaggaguaccggcuuuaucgcgagaaaaagucugccagcuggaucacacggauuagaccugagcuggucaaaaacggacaguuccauauccccuccaucaccugggaacacacgggccgcuacgggugccaauauuacucuagagcgcgguggagcgagcucuccgauccucuggugcugguuaugaccggagcuuauccgaagcccacacucagcgcccagccuucucccguggucaccuccggcggccgcgugacacugcagugugagagccagguugccuuugggggauucauucuuugcaaagaaggcgaggaagaacauccucaaugucugaacucucagccccacgcuagaggguccagccgggccaucuuuucugugggaccggucuccccuaaucgcagauggagccaucggugcuacggcuaugaccucaauucccccuacguguggucuagcccuuccgaucugcuugagcugcucgugcccggggucagcaagaagcccucucuguccguucagccuggaccggugguggcucccggcgaaagccugacccuccagugugucucugacgugggcuacgaucgcuucguucuguauaaagagggggaaagagaccuucggcaacugccuggacgccagccccaggccggccucagccaagcgaacuuuacgcuggggccuguguccagaucuuacggaggccaguaucggugcuacggggcccacaaucuuagcuccgaguguagcgcucccucugauccgcuggacauucucaucacaggacagauuagaggcaccccuuucaucuccguccagcccggcccuacaguggccagcggggaaaacguuacccugcugugccaaucuuggcgccaguuucacaccuuccuccugacaaaggcuggagccgcggaugcuccccuucggcugagauccauucaugaguauccuaaauaccaggccgaguuucccaugagcccggugacguccgcccacgcuggcaccuaucgcuguuacgggucucucaauagcgacccuuaccugcuuucccaucccucugaaccccuggagcucgucgugagcggaccuuccaugggcagcucuccgcccccuacagggcccaucuccaccccugccggccccgaagaucagccucugacacccaccggaagcgacccgcaaucuggccuggggcggcaccucggagucgugaucggcauucugguugccgugguccuucugcuccugcugcuucuccugcuguuccucauccugagacaccgccggcaggggaagcauuggacguccacacagagaaaagcugauuuucagcacccugcgggagccgugggccccgagccuaccgaccgcgggcuucaauggcggagcucucccgcugccgacgcccaggaagagaaccuguaugcugccguuaaggauacccagccggaggacggcguggaaauggauacaagagcggcugccagcgaggccccucaggacgucaccuacgcucaacuccauucccugacacugcgccggaaggccacggaacccccucccagccaggagagagaacccccugcugagccgucuauuuaugccacccuugcgauccacuga

SEQ ID NO: 3285 - RNA, 498 nt, Artificial Sequence
  CCDS6385.2 variant
auggcccugcucgcucugcuucugguggucgcccuccccagaguuuggaccgacgcgaaccugacagcucggcagcgcgauccugaggacagccaaagaacggaugaaggcgacaaucggguguggugccacgugugugagcgcgaaaacaccuucgagugccagaauccgagacgguguaaguggacagaacccuacugcgucaucgccgccgugaaaauuuuuccucgcuucuuuaugguugcuaagcaguguuccgccgggugcgcugccauggagagacccaaaccugaggaaaagcgguuccuucuggaggaacccaugccguuuuucuaucucaaauguugcaagauccgcuacuguaaccuggagggaccucccauuaauucuagcguguuuaaggaguaugcgggcuccaugggggaaucuugcggaggccuguggcucgccauccugcuucugcucgcuagcauugccgcugggcugucccuuucuuga

SEQ ID NO: 3286 - RNA, 375 nt, Artificial Sequence
  AAA68873 variant
augagccuggagcagaagucccaacacugcaaacccgaagagggccucgacacccaggaagaggcccuggggcuugugggaguccaggcugccacaacggaggaacaggaggcgguuucuagcuccucuccucuggugccgggcacccucggggaagugcccgcugccggaagcccuggcccccugaaguccccucaaggggccucugcuauccccacagccauugauuucacccuuuggagacagagcaucaaaggauccagcaaccaggaggaagagggcccuucuacauccccggaccccgagagcgucuuucgggcugcccugucuaagaaaguggcggaucucauucauuuccugcugcucaaguacuga

SEQ ID NO: 3287 - RNA, 957 nt, Artificial Sequence
  AAH02455 variant
augcugcucggccaaaagagccagagauacaaagccgaggaagggcugcaggcucagggagaggcccccggccuuauggacgugcagaucccuaccgcggaggaacaaaaggcugccuccucuagcuccacacugauuauggggacgcucgaagaggucaccgauucuggaagcccgucucccccucagucccccgagggcgccagcuccagccugacaguuaccgacucuacacuuuggucccagagcgaugaagggucuuccagcaacgaggaagagggaccuucuaccucccccgacccugcucaccuggagagccucuuccgggaagcccuggaugagaaaguggcugaacuggugcgcuuucuccugagaaaguaucagaucaaagagccggucacaaaggccgaaaugcuugaguccgugauuaagaauuacaaaaaccauuuccccgacaucuuuucuaaggcgagcgagugcaugcaaguuauuuucggcaucgaugugaaagaagucgacccugccggccacuccuauauccuggugaccugucucgggcugagcuacgauggacuucugggcgacgaucagucuacgcccaagaccgggcuccugauuaucguucugggaaugauucucauggagggcucccgggcuccugaagaggccaucugggaagcucugagcgugauggggcuuuaugacggacgcgagcauucugucuacuggaaacugagaaagcuccugacacaggagugggugcaggaaaauuaucuugaguaccggcaagcccccggcagcgauccggugcgcuacgaauuucuguggggcccuagagcgcucgccgagaccuccuaugucaagguucuggaacacguggugcgggucaacgcucgcgugagaauuucuuaccccagccugcaugaggaggcccucggggaagagaaaggaguuuga

SEQ ID NO: 3288 - RNA, 1290 nt, Artificial Sequence
  AAH04479 variant
auggagacccaguucagacggggcgggcugggaugcagccccgccuccaucaagcgcaaaaagaaaagagaagacucuggcgauuuugggcuccaagugagcacaauguucuccgaggacgauuuucagucuacggaacgggcuccuuacggaccgcagcugcaguggagccaagaccuuccccgcguccagguuuucagagagcaggccaaccuggaagaucgguccccucgcagaacccagcggauuacaggcggggagcaagugcucuggggacccaucacccagauuuuuccuacagugcgccccgcggaccugaccagagucaucaugccucuugagcagcggucucagcacuguaagccggaagagggccugcaagcucaggaagaggaucucggccuggugggggcccaggcccugcaagcugaggaacaggaggccgcuuucuuuagcuccacacucaauguuggaacccuggaggaacuucccgccgcggaaagcccuucucccccucagagcccccaggaggaguccuucucuccgacggccauggacgcuauuuuuggcucccugagcgaugaagggucuggaucccaagagaaagaaggcccuagcaccucccccgaccucaucgauccugagucuuucagccaggacauccugcaugauaagauuaucgaccuugugcaucugcuccugcgcaaguauagagucaaagggcugauuacaaaggccgaaaugcucggauccgugaucaaaaacuacgaggacuauuuucccgagauuuuccgggaagcuagcguuugcaugcagcugcuuuuuggcaucgaugugaaggaggucgaccccaccucucacuccuacgugcuggugacaagccucaaucugucuuaugauggcauucaguguaacgaacaaagcaugccuaaauccgggcuucugaucaucguccucggaguuauuuucauggagggcaauugcaucccggaagaggugaugugggaggugcugucuauuaugggggucuacgccggacgcgaacacuuccuguuuggcgagcccaagagacuccugacccagaacugggugcaggaaaaguaucuuguuuacagacaggugccugggacggaccccgcguguuacgaguuccuguggggaccucgggcccaugcugagacaagcaaaaugaagguccucgaauauaucgccaaugcuaacggccgcgaucccaccuccuacccgagccuguaugaggacgcccuucgggaagagggcgaagggguguga

SEQ ID NO: 3289 - RNA, 1110 nt, Artificial Sequence
  EAW99421 variant
augcccagagccccuaagcggcagcgcugcaugccggaggaagaccugcaaagccaguccgagacccagggacucgaaggggcucaggcgccccuggccguggaggaagaugcuucuagcuccacaucuacgagcuccucuuucccuagcuccuuucccagcagcuccucuucuuccuccucuuccuguuacccucuuauccccagcaccccugaggaggucuccgccgacgaugaaacaccgaaucccccucaaucugcccagauugcuugcagcucccccagcguuguggccucucugccucucgaccaguccgaugagggaagcucuagccagaaagaagagucccccucuacccugcaagugcuuccggacagcgagucccugccuagaagcgaaaucgaugagaaggucacagaccucgugcaguuccugcuguuuaaauaucagaugaaggaacccauuaccaaagcugagauccucgaaucuguuauuaagaacuacgaggaucacuucccucugcuuuuuagcgaggccagcgaauguaugcugcucguguucggcaucgacgucaaggagguggaucccacagggcauucuuuuguucuggugaccucccuuggacugacguaugacggcaugcucagcgauguccaguccaugcccaaaaccgggauccugauucugauccucucuauuaucuucauugaaggauacugcacaccugaggaagugaucugggaggcgcugaacaugaugggccuuuaugacggcauggagcaccugauuuacggggaaccgcggaagcuccugacccaagacugggugcaggagaauuaucuugaauaccgccagguccccggaagcgauccugccagauacgaguuucuguggggcccccgggcucaugccgaaauccgcaaaaugucccuccugaaguuccuggcuaaaguuaacgggucugacccucggagcuuuccccucugguaugaggaggcccugaaggaugaagaggaaagagcgcaagaccgcaucgccacaaccgaugacacgacagcuauggccuccgcuucuagcuccgccaccggcagcuucucuuacccggaguga

SEQ ID NO: 3290 - RNA, 945 nt, Artificial Sequence
  AAH03408 variant
augccccuggagcagagaagccaacacugcaagccugaagagggccucgaagcccagggggaggcucugggacuugugggcgcccaggcgccggcuaccgaagaacaggagacagccuccucuagcuccacgcuggucgaaguuacccuccgggaggugcccgccgcugaaucuccuagcccuccccauucuccccaaggggccuccacacugccuaccacaaucaacuacacccuuuggagccaguccgacgagggaagcucuaaugaggaacaggagggcccguccacauuccccgaucuggaaaccagcuuucagguggcucucucucgcaaaauggccgagcugguccacuuccugcuccugaaguacagagcgcgggaaccuuuuacgaaagccgagaugcuuggguccgugauucgcaacuuccaagacuuuuuccccguuaucuuuagcaaggcuucugaguaccugcagcucguguucggaauugaagucguggagguugugagaaucggccaucuguauauucuugucaccugucugggccucuccuacgaugggcugcugggagacaaucagaucgugccuaaaacaggccuccugaucauugugcuugccaucauugcuaaggaaggggauugcgcccccgaggaaaagaucugggaggagcugagcguccucgaagcguccgacggacgggaggauucuguuuuugcccacccgcgcaaacugcuuacccaggaccuggugcaagaaaacuaucucgaguacagacaggugccuggcagcgaucccgcuuguuaugaguuccugugggggccucgggcccuggucgagacauccuacgugaagguucuccaucaucugcuuaaaauuagcggaggcccccacaucucuuaucccccucugcacgagugggcuuuucgcgaaggcgaggaauga

SEQ ID NO: 3291 - RNA, 930 nt, Artificial Sequence
  AAA03229 variant
augagccuggagcagagaucccuccacugcaagcccgaagaggcccuggaagcucaacaggaggcccuuggccugguguguguccaggcggcuaccucuagcuccucuccucucguucuggggacacuugaagaggugccgacggccggaagcaccgaucccccucagucuccccaaggcgccuccgcuuucccuacaaccaucaacuuuacacggcagcgccagcccagcgagggguccagcucuagagaagaggaaggaccuuccaccagcugcauucuggagucucucuuccgggccgugaucaccaaaaaggucgcugaccuggugggcuuucugcuccugaaauaccgcgccagagagccgguuacaaaggcggaaaugcuugaguccgugauuaaaaauuauaagcauuguuuccccgaaaucuuugggaaggccagcgagucucugcagcucgucuucggaauugacgugaaagaagcugauccuacgggccacuccuacguucuggugaccugccuuggccugagcuaugacgggcuccugggagauaaccaaaucaugcccaagacaggcuuucugaucauuguccucgugaugaucgccauggaagggggacaugcuccugaggaagagauuugggaggagcuguccgugauggaagucuacgacggccgggagcacucugccuauggggagccccgcaaacuucugacccaggaucucguucaggaaaaguaccuggaguauagacaggugccggacagcgauccugcgcgguacgaguuccuuuggggaccccgcgcccuggcugaaacauccuacgugaaaguccucgaauaugugaucaagguuagcgccagagugcgguuuuucuuuccuucucugcgcgaggcugcccugagagaggaagaggaaggcgucuga

SEQ ID NO: 3292 - RNA, 945 nt, Artificial Sequence
  AAA17729 variant
augccccuggagcagagaagccaacacugcaagccugaagagggccucgaagcccggggcgaggcucugggacuugugggcgcccaggcgccggcuaccgaggaacagcagacagccuccucuagcuccacgcuggucgagguuacccucggggaagugcccgccgcugacucuccuagcccuccccauucuccccaaggagccuccagcuucuccacaaccaucaacuacacacuguggcgccagagcgaugaggggucuuccaaucaggaagaggaggggccuagaauguuuccggaccuugaaagcgaguuccaggcugccauuucucggaaaaugguggaacugguccacuuucuccugcugaaguaccgcgcgagagagcccgugaccaaagccgaaaugcucgaguccguucugcggaacugucaagauuucuuuccugugaucuucagcaaggcuucugaguaccuucagcuggucuuuggaauugaagugguugaggugguccccaucucccaucucuauauucuggugacaugccuuggccugagcuacgacggccuccugggggauaaucaggugaugccuaaaaccggacugcucaucaucguccuggccauuaucgcuauugaaggcgacugugcccccgaggaaaagaucugggaggagcuuuccaugcuggaaguuuucgaggggcgcgaagauucuguguuugcgcacccgagaaagcuccugaugcaggaccuugugcaagagaacuaucuggaauaccggcaggucccuggaagcgaucccgccugcuaugaguuccucuggggcccucgcgcucugauugagacguccuacgugaaaguucugcaucacacccucaagaucgggggagaaccccacauuagcuaucccccucugcaugagagagcccuucgggaaggcgaggaguga

SEQ ID NO: 3293 - RNA, 945 nt, Artificial Sequence
  AAA17446 variant
augccccuggagcagagaagccaacacugcaagccugaagagggccucgaagcccgcggggaggcucugggacuugugggcgcccaggcgccggcuaccgaggaacaggaggccgccuccucuagcuccacacuggucgaaguuacgcucggggaggugcccgcugccgaaucuccugaucccccucagagcccccaaggagcuuccucucugccuaccacaaugaacuacccgcuuuggagccaguccuaugaggacagcucuaaucaggaggaagagggccccuccaccuucccugaccuggaaagcgaguuucaggccgcgcucucucggaaaguggccgaacugguccauuuccugcuccugaaguacagagcucgggagcccgugacaaaagccgagaugcuuggguccguugugggaaacuggcaauacuuuuucccugucaucuuuagcaaggcuucuuccagccugcagcucguguucggcauugaacugauggagguugaucccaucggccaccuuuauauuuuugccaccugucuggggcucuccuaugacggacugcugggcgauaaucagaucaugccgaaagcggggcuccugauuaucgugcuugccaucauugcucgcgaaggagacugcgccccugaggaaaagaucugggaggagcugucuguccucgaaguguucgagggcagagaagauagcauucugggggaccccaagaaacuucugacacagcauuuugugcaagagaacuaccucgaauaucggcaggucccuggauccgaucccgcuuguuacgaguuccuguggggcccccgcgcccugguugagaccagcuacgugaaggugcuccaccauauggucaaaaucucuggcgggccucacauuuccuauccgccccugcacgaaugggugcuuagagagggagaagaguga

SEQ ID NO: 3294 - RNA, 954 nt, Artificial Sequence
  EAW99410 variant
augagcuccgagcagaagucucaacacugcaaacccgaagagggcguggaagcccaggaggaagcucuggggcucgucggagcccaggcgccuaccacagaggagcaggaagcugccguuagcuccucuagcccgcuggugcccggcacgcuugaggaagugccugccgcugaguccgccgggcccccucaaucuccccagggagcuagcgcccugccuaccacaaucuccuucaccuguuggagacagccgaacgagggcucuagcucccaggaagaggaagggcccagcacaucuccugacgcggagucccucuuucgggaagcccugagcaauaaggucgaugagcuugcucauuuccugcuccgcaaauacagagccaaggagcuggugaccaaagcugaaaugcuggagcggguuauuaagaacuauaagcgcugcuuucccgugaucuucggaaaagccucugaaucccucaagaugauuuuuggcaucgacgucaaagagguggauccugcgagcaauacauacacccugguuacgugucuuggccuguccuaugacgggcuccugggaaacaaucaaauuuuccccaagaccggccuucugaucaucgugcucgggacaauugccauggaaggagauucugcuagcgaggaggaaaucugggaggaacugggcgucauggggguguacgacggaagagagcacaccguguauggcgaaccgcggaaacugcucacacaggauuggguccaggagaacuaccuggaguaucgccagguuccuggcuccaaucccgccagauacgaauuucuuugggggccucgggcucuggccgagaccagcuacgugaaggugcucgaacaugucgugcgcguuaacgccagagugcggauugcuuaucccucucugcgcgaggcggcccuucuggaggaagaggaaggagucuga

SEQ ID NO: 3295 - RNA, 954 nt, Artificial Sequence; identical to SEQ ID NO: 3294
  AAA68871 variant

SEQ ID NO: 3296 - RNA, 954 nt, Artificial Sequence
  AAY27261 variant
augagcuccgagcagaagucucaacacugcaaacccgaagagggcguggaagcccaggaggaagcucuggggcucgucggagcccaggcgccuaccacagaggagcaggaagcugccguuagcuccucuagcccgcuggugcccggcacgcuugaggaagugccugccgcugaguccgccgggcccccucaaucuccccagggagcuagcgcccugccuaccacaaucuccuucaccuguuggagacagccgaacgagggcucuagcucccaggaagaggaagggcccagcacaucuccugacgcggagucccucuuucgggaagcccugagcaauaaggucgaugagcuugcucauuuccugcuccgcaaauacagagccaaggagcuggugaccaaagcugaaaugcuggagcggguuauuaagaacuauaagcgcugcuuucccgugaucuucggaaaagccucugaaucccucaagaugauuuuuggcaucgacgucaaagagguggauccuacaagcaauaccuacacgcugguuaccugucuuggccuguccuaugacgggcuccugggaaacaaucaaauuuuccccaagacaggccuucugaucaucgugcucgggaccauugcgauggaaggagauucugccagcgaggaggaaaucugggaggaacugggcgucauggggguguacgacggaagagagcacacaguguauggcgaaccgcggaaacugcucacccaggauuggguccaggagaacuaccuggaguaucgccagguuccuggcuccaaucccgcuagauacgaauuucuuugggggccucgggcccuggcugagacgagcuacgugaaggugcucgaacaugucgugcgcguuaacgccagagugcggauugccuaucccucucugcgcgaggcugcgcuucuggaggaagaggaaggagucuga

SEQ ID NO: 3297 - RNA, 945 nt, Artificial Sequence
  BAF82126 variant
augccccuggagcagagaagccaacacugcaagccugaagagggccucgaagcccgcggggaggcucugggacuugugggcgcccaggcgccggcuaccgaagaacaggaggccgccuccucuagcuccacacuggucgaaguuacgcucggggaggugcccgcugccgaaucuccugaucccccucagagcccccaaggagcuuccucucugccuaccacaaugaacuacccgcuuuggagccaguccuaugaggacagcucuaaucaggaggaagagggccccuccaccuucccugaccuggaaagcgaguuucaggccgcgcucucucggaaacuggccaagcuggugcauuuccuccugcuuaaauacagagcucgggaacccgucacaaaggccgagaugcugggguccgugguuggaaacuggcaauauuucuucccugugaucuuuagcaaggcuucugauucccuccagcuggucuucggcauugagcuuauggaaguggaccccaucggccacguuuacauuuuugccaccugucuggggcucagcuaugauggacugcugggcgacaaucagaucaugccgaaaacaggguuccucauuaucauccuggcgauuaucgccaaggagggagauugcgcuccugaagagaaaauuugggaggagcuuuccgugcuggaggucuuugaaggccgcgaggacaucauuuucggggaucccaagaaacuccugacccaguacuuugugcaagaaaacuaucuugaguacagacaggugccuggaucugaccccgccuguuacgaauuucuguggggcccccgggcucucaucgagacgagcuaugucaagguucugcaucacauggugaaaauuuccggcgggccucgcaucagcuacccgcugcuccaugagugggcccugagagaaggagaggaauga

SEQ ID NO: 3298 - RNA, 945 nt, Artificial Sequence
  AAA19006 variant
augccccuggagcagagaagccaacacugcaagccugaagagggccucgaagcccgcggggaggcucugggacuugugggcgcccaggcgccggcuaccgaagaacaggaggccgccuccucuagcuccacacuggucgaaguuacgcucggggaggugcccgcugccgaaucuccugaucccccucagagcccccaaggagcuuccucucugccuaccacaaugaacuacccgcuuuggagccaguccuaugaggacagcucuaaucaggaggaagagggccccuccaccuucccugaccuggaaagcgaguuucaggccgcgcucucucggaaaguggccaagcugguccauuuccugcuccugaaauacagagcucgggaacccgugacaaaggccgagaugcuuggguccguugugggaaacuggcaauauuucuucccugucaucuuuagcaaggcuucugauucccugcagcucguguucggcauugagcugauggaaguugaccccaucggccacguguacauuuuugccaccugucuugggcugagcuaugauggacuccugggcgacaaucagaucaugccgaaaacaggguuccugauuaucauccucgcgauuaucgccaaggagggagauugcgcuccugaagagaaaauuugggaggagcuguccguccuugagguguuugaaggccgcgaggacucuaucuucggggaucccaagaaacugcucacccaguacuuugugcaagaaaacuaucuggaguacagacaggucccuggaagcgaccccgccuguuacgaauuucuuuggggcccccgggcucugauugagacguccuauguuaaggugcuccaucacauggugaaaaucagcggcgggccucgcauuucuuacccgcugcugcaugagugggcccucagagaaggagaggaauga

SEQ ID NO: 3299 - RNA, 945 nt, Artificial Sequence
  CAG46567 variant
augccccuggagcagagaagccaacacugcaagccugaagagggccucgaagcccgcggggaggcucugggacuugugggcgcccaggcgccggcuaccgaagaacaggaggccgccuccucuagcuccacacuggucgaaguuacgcucggggaggugcccgcugccgaaucuccugaucccccucagagcccccaaggagcuuccucucugccuaccacaaugaacuacccgcuuuggagccaguccuaugaggacagcucuaaucaggaggaagagggccccuccaccuucccugaccuggaaagcgaguuucaggccgcgcucucucggaaaguggccaagcugguccauuuccugcuccugaaauacagagcucgggaacccgugacaaaggccgagaugcuuggguccguugugggaaacuggcaauauuucuucccugucaucuuuagcaaggcuucugauucccugcagcucguguucggcauugagcugauggaaguugaccccaucggccacguguacauuuuugccaccugucuugggcugagcuaugauggacuccugggcgacaaucagaucaugccgaaaacaggguuccugauuaucauccucgcgauuaucgccaaggagggagauugcgcuccugaagagaaaauuugggaggagcuguccguccuugagguguuugaaggccgcgaggacucuaucuucggggaucccaagaaacugcucacccaguacuuugugcaagaaaacuaucuggaguacagacaggucccuggaagcgaccccgccuguuacgaauuucuuuggggcccccgggcucugauugagacguccuauguuaaggugcuccaucacauggugaaaaucagcggcgggccucgcauuucuuacccgcugcugcaugagugggccuuuagagaaggagaggaauga

SEQ ID NO: 3300 - RNA, 948 nt, Artificial Sequence
  AAA68877 variant
augagccuggagcagagaagcccccacugcaagccugacgaagaucucgaggcccaaggcgaagaccuggggcuuaugggagcucaggagccgaccggcgaagaggaggaaacaacgucuagcuccgauucuaaagaggaagaggugagcgccgcgggguccucuagcccuccccagucuccccagggaggcgcuuccuccuccaucagcgucuacuauacccuguggucucaauucgacgagggguccagcucucaggaagaggaggaaccuuccagcuccguugaucccgcccagcucgaauuuauguuccaggaggcccugaaacuuaagguggcugagcuggugcauuuucuccugcacaaguaccgggucaaagaaccugugacaaaggccgagaugcuggaaucuguuauuaagaacuauaaacgcuacuucccggugaucuuuggaaaggcuagcgaguucaugcaagucauuuuuggcaccgacgugaaagaaguugaucccgccggccauuccuauauccucgugacagcgcuggggcuuagcugugacucuaugcugggagauggccacuccaugccuaaggccgcucuccugauuaucguccuuggggugauccugaccaaagacaauugcgcccccgaggaggugauuugggaagcucucagcgucaugggaguuuacgugggcaaggagcauauguucuauggggaaccuagaaagcugcugacacaggauugggugcaggagaacuaccucgaauaccggcagguccccggaucugacccggcccacuaugaguuucuguggggcagcaaagcgcacgccgagaccuccuacgaaaaggugaucaauuaucuuguuaugcugaacgcucgcgagccuauuuguuaccccucucucuaugaagaggugcugggcgaggaacaagagggggucuga

SEQ ID NO: 3301 - RNA, 1044 nt, Artificial Sequence
  AAI01309 variant
augcccagaggccaaaagagcaaacugcgggcccgcgagaagagacggcaggcucgcgggggacucgaagaccugaucgaugcccuugacauucuggaggaagaggaagaguccccuccgucugcgagcgcuugccucaaagauguguuccaguccucucuggacggcgccagcaacaauccccacgggcuuagagaggcccaguccaccucuacaagcgcuacggccgcuucccauacccggcacccugaaggagugaacgaucagauggaggaacgccccaucuguacacaagaccuggaggccaccgauagcuuuccuagaggccccguugacgagaaggugauuauccucgugcauuaccugcuguauaaauaccagaugaaggaaccuauuacaaaggcggauaugcuccggaaugucacccagaugucuaaaucccaguucccggugauccugagccgcgccucugagcaccuugaacugaucuuugggcucgaccugaaggagguugaacccaacaaacauauuuaugugcuugucaauaagcuggaucucggaugcgacgcuaaacuguccgaugagacaggcgugccuaagaccggccugcucaugacgguucuggggaucauuuucaccaacggaaauuguguggccgaggaagaggucuggaagguguuuaacacaaugggccuuuacgacgggaucgaacacuucauguuuggagagcccagaaaacugcucaccaaggaccuggugaaagaaaauuaucuugaguaccaacaggucccuaacagcgaucccccgcgguaucaguuccuguggggcccucgcgcucacgccgagacaucuaagaugaaaguucucgaauuucuggcgaaggugaaugacaccgcccccuccgaguucagcaacugguacacggaagcucugcaggaugaggaagagagagcccgggcucgcguggccgccaaagcuagagucuccgcgacagccggggcucggucuaaggucaagagcuccaaaagcucucaacuccaguga

SEQ ID NO: 3302 - RNA, 975 nt, Artificial Sequence
  CCDS43927.1 variant
augagccaggaccaggagucccccagaugcacccacgaucagcaucugcagacauucucugaaacgcagagccucgagguggcccaagucuccaaggcucuggagaaaacccuucugucuagcucccacccucucguuccgggcaagcugaaagaagcccccgcggcuaaggccgaaucuccucuugaggugccccagagcuuuuguuccagcucuaucgccgugacaaccacauccagcucugaguccgacgaagcuagcucuaaccaggaggaagaggauuccccuagcuccucugaggacaccagcgauccccggaaugucccugccgacgcucuggaucagaaaguggccuuccucguuaacuuuaugcugcauaagugccaaaugaagaaaccgauuacaaaggcggacaugcugaaaaucauuaucaaggaugacgaaucccacuucagcgagauucuccugcgcgccucugaacaucuugagaugaucuuugggcuggauguggucgaaguggaccccaccacgcacuguuacggacucuucaucaaacugggccuuaccuaugaugggaugcuguccggagagaagggcguuccuaagacagggcuccugauuaucgugcugggagucauuuuuaugaaaggcaauagagcuaccgaggaagaggugugggaagugcucaaccugacaggcgucuacagcgggaagaaacacuucaucuuuggagagccccggaugcuuauuaccaaggacuucguuaaagaaaaguaucuggaguaccaacagguggccaauucugacccugcucgcuaugaguuucucuggggccccagagccaaagcggaaacgagcaagaugaaggugcuggaguucgucgccaaagugcauggguccuacccgcacucuuuuccuagccaguaugcugaagcccuuaaggaggaagaggagcgggcucgcgccagaaucuga

SEQ ID NO: 3303 - RNA, 1011 nt, Artificial Sequence
  CCDS59524.1 variant
augcccagaggccaggccagcaagcggcgcgcuagagagaaacggcgccaagccagaggggaagaccagugccugggaggcgcgcaggcuaccgccgccgagaaggaaaaacucccuuccucuagcuccccggcuugucagucucccccucagagcuuccccaacgccgggaucccucaagagucccagcgggcuucuuaccccagcuccccugccagcgcggugucucugacauccagcgaugaaggagccaagggccagaaaggggagucuccgaauagcuuucacggacccuccucuuccgagagcacgggccgcgaccuucugaacaccaagacaggcgaacucguccaauuccugcuuaauaaguauauuagaaaagagccuaucacccgggaagcuaugcugaagguuauuaaccgcaaauacaagcagcauuuucccgagauccucagacgguccacagagaauguggaaguggucuucgggcuguaucugaaagagauggauccuucucgccagagcuacgugcucguuggaaagcuggacuuucccaaccagggcucccuuagcgaugggggaggcuucccgcugucugggcuccugauggugcuucuguccaccauuuuuaugcacggaaauagagccacagaagaggaaaugugggagugccucaacgcucugggcauguauaagggccggaaacauuucaucuacggggagccucaagaacuggucaccaaggaccucgugcgcgagggauaucuggaauaccagcagguucccagcucugauccucccagauacgaguuucuuuggggcccccgggccagagcggaaacgagcaaaaugaaggugcuggaguucgucgccaaacucaaugacaccguggcuuccacauauaagucucgcuacgaggaagcccugcgggaggaagaggaacaagcuagagcccgcgccguggcucgggauagcgcgagagcccgcgcuucccggagcuuucagccuuga

SEQ ID NO: 3304 - RNA, 1044 nt, Artificial Sequence
  AAC23616 variant
augcccagaggccaaaagagcaaacugcgggcccgcgagaagagacggaaagcucgcgaagagacccaggggcucaaggugagacacgccacagcggcugaaaaagaggaaugcccuuccucuagcccgguccugggagacacgcccaccuccucuccugccgccggcaucccccagaagccucagggggcucccccuacaaccacagccgcugccgcgguuagcuguaccgaguccgaugagggagccaagugccagggcgaagagaacgcuucuuucagccaagccacaaccuccacggaaagcucugugaaagacccgguggcuugggaggccgggaugcuuaugcauuuuauucugcggaaguacaaaaugcgcgagcccaucaugaaggcggauaugcucaaagucguggacgaaaaguauaaggaucacuucaccgagauucugaauggagccuccagacggcuugaacugguuuuuggccucgaccugaaagaggauaacccuagcucucauacauacacccugguguccaagcucaaucugacaaacgacggcaaucuuagcaacgauugggacuucccccgcaaugggcugcucaugccucugcuuggagucaucuuucugaaaggcaacucugcuaccgaagaggagauuuggaaguucaugaaugugcucggggccuaugauggagaggaacaccugaucuacggcgaacccagaaaauuuaucacgcaggaccugguucaggagaaguaucucaaauacgaacaggugccgaacuccgauccuccccgguaucaauuccugugggggccucgcgcuuacgccgagacaaccaagaugaagguccuugaguuucuggccaaaaugaauggagcuacacccagagacuuccccagccauuacgaagaggcgcuccgggacgaagaggaacgcgcccaggugagauccucugugcgggcuagacgccggaccaccgccacaacguuuagagcccgcagccgggcuccuuucuccagaagcucucacccgauguga

SEQ ID NO: 3305 - RNA, 960 nt, Artificial Sequence
  AAD10635 variant
augcccagaggccaaaagagcaaacugcgggcccgcgagaagagacggaaagcucgcgacgaaaccagagggcucaacgugccucaggucacagaggccgaagaggaagaggcgccgugcuguuccucuagcguuuccggaggcgcugccucuagcucccccgccgcugggaucccucaggagccccagcgggccccuacgaccgcugccgcggccgcugccggagugucuagcacaaaguccaaaaagggcgcuaagagccaccagggggaaaagaaugccucuuccagccaagcgucuaccuccacaaagagccccucugaggauccucugacccgcaaauccggaagccuugugcaguuccugcucuacaaguauaaaauuaagaaguccgucacaaaaggcgaaaugcugaagaucgugggcaaaagauuucgggagcauuucccggagauucuuaagaaagccucugaagggcugagcguuguguuuggacucgagcugaacaaggucaaucccaacggccacaccuacacguucaucgacaaaguggaucugaccgacgaagagucccuccugagcucuugggauuuuccucgcagaaaacuucugaugccccuccuggggguuauuuuccuuaauggaaacuccgcuacagaagaggagaucugggaauuucugaauaugcucggcguguaugacggggaggaacauagcgucuucggagagccuuggaagcugaucaccaaagaucuggugcaggaaaaguaccucgaguauaaacaggugcccucuagcgacccgccucgguuucaauuccuguggggcccccgcgccuacgcugagacauccaagaugaaaguccuugaauuucuggccaagguuaacggcaccacgccuugcgccuuccccacacacuaugaggaagcucucaaggaugaggaaaaagcggggguguga

SEQ ID NO: 3306 - RNA, 1041 nt, Artificial Sequence
  AAD10636 variant
augcccagaggccaaaagagcacccugcacgcccgggagaaacgccaacagacaagagggcagacgcaggaccaucaaggagcucagaucaccgccacaaacaagaaaaagguguccuucucuagcccucucauucugggcgcgaccauccagaaaaaguccgcugggcggucucgcagcgcccuuaagaaaccgcagagagcccuguccacaaccacaucugucgauguuagcuacaagaaauccuauaagggagcuaauagcaaaauugaaaagaagcaaucuuuuucccagggccucagcucuaccgugcagucccggacggacccccugaucaugaaaaccaacaugcuugugcaguuccugauggagauguacaagaugaaaaagccuauuaugaaagccgauaugcucaagaucguccagaaaagccacaagaauugcuuucccgaaauccugaagaaagccucuuucaacauggaggugguuuuugggguggaccugaagaaagucgauuccacaaaggacagcuaugugcucguuuccaaaauggaucugccuaauaacggaaccgugacacgcggcagaggcuuccccaagaccgggcuucugcucaaucugcuuggagucauuuuuaugaagggcaacugugcuacggaagagaaaaucugggaguuccugaauaagaugcggauuuacgacgggaaaaagcauuuuaucuucggagaaccucgcaaacucauuacacaggaucuggugaagcugaaguaucucgaguacagacaggugccgaacucuaaucccgcgcgguaugaauuucuguggggcccucgcgcccacgcugagaccagcaaaaugaagguccuugaguucugggccaaaguuaacaagacagugcccuccgcuuuucaauucugguacgaagaggcccugagagacgaagaggaacgggugcaggcggccgcuaugcucaaugaugggagcucugccaugggacgcaaaugcuccaaggcuaaggccagcucuagcucccaugccuga

SEQ ID NO: 3307 - RNA, 1041 nt, Artificial Sequence
  AAC23619 variant
augcccagaggccagaagucuaaacugcgggcccgcgagaagagacaacggacccgcgggcagacacaggaccucaaagugggacagccuacggcugccgaaaaggaggaauccccgucuagcuccucuagcguccugagagauaccgcguccucuagccuugcuuucggcaucccccaagagccucagcgggaacccccuacaaccuccgccgccgcugccaugagcugcacagggucugacaaaggagaugagucccaggacgaggaaaacgcuagcagcucccaggccagcaccucuacagagcgcucccugaaggauagccucaccagaaagacgaaaaugcugguucaauuucuucuguacaaguauaaaaugaaggaacccaccacaaaagcggagaugcucaagauuaucuccaagaaauacaaggagcacuucccugaaauuuuucggaaagugucucagcgcaccgagcugguguucggccuggcccucaaggaagucaauccgacaacccauagcuauauccugguguccaugcuugggcccaacgacggaaaucagagcucugcuuggacgcugccuagaaacggccuccugaugccccuucuguccguuauuuuucucaauggcaacugugcccgggaggaagagaucugggaguuccugaauaugcuggggaucuacgauggaaaacgccaccucauuuuuggcgaaccuagaaagcugaucacacaggaccuugugcaagagaaauaucuggaauaccagcagguccccaacagcgauccgccucgguaucaauuccucugggggccccgcgcucaugccgagaccucuaagaugaaggugcuggaauuucuugcgaaaguuaaugacacaaccccuaacaauuucccccugcucuacgaggaggcccugagagaugaagaggaacgggcuggagccagaccccgcguggcugcccggagaggcaccacagccaugacgagcgcuuacucccgcgcgaccucuagcuccagcucucagccuauguga

SEQ ID NO: 3308 - RNA, 828 nt, Artificial Sequence
  CCDS65233.1 variant
augaccagcgccggcguguucaacgcuggguccgacgagagagccaauucucgggaugaagaguaccccugcagcuccgaagucucuccuagcacagaguccucuuguagcaacuuuaucaauauuaagguuggacugcucgaacaguuccugcuuuauaaauuuaagaugaaacaacgcauccugaaggaggacaugcucaaaauugugaacccgagauaccagaaucaguucgcggagauccaccggcgcgcuuccgaacauauugagguggucuuugccguggaucugaaggaaguuaaccccacgugccaccuuuaugaccuggugagcaagcucaaacugccuaauaacggcagaauccaugucgggaaggugcugcccaaaaccggacuccugaugacauuccuuguugugaucuuucugaagggcaauugugccaacaaagaggauaccuggaaguuccucgacaugaugcagauuuacgaugggaagaaauauuacaucuauggagagccucggaagcugauuacacaagacuuuguccgccuuaccuaccuggaauaccaccaggugcccugcucuuauccugcucauuaccaguuccucuggggcccgagagccuauacagagaccuccaaaaugaaggugcuggaauaccuggcuaaagucaaugauaucgcccccggcgcguuuagcucucaguaugaggaagcccuccaagacgaggaggaauccccuagccagcgguguucucgcaacuggcacuacugcuccgggcaggauugucugagagcuaaguucagcuccuuuucucagcccuauuga

SEQ ID NO: 3309 - RNA, 1224 nt, Artificial Sequence
  AAH67286 variant
augcccagaggccacaagagcaaacugcggaccugcgagaagcgccaggaaacaaacgggcaaccucagggacucacgggcccgcaggccaccgcugagaaacaggaagagucccauucuagcuccucuagcuccagagccugucugggggacugccggcgcucuagcgaugcguccaucccccaagaaagccagggagugucuccuacaggcucccccgacgcugucguuagcuacucuaaguccgauguggccgccaaugggcaggacgagaaaagcccuucuaccuccagagaugcuagcgugccccaggagucccaaggagccucuccuacaggcagcccggacgcuggcgucuccgggagcaaguaugauguggccgcgaacggacaggacgaaaagucucccuccaccagccacgauguuucugugccucaggagagccagggcgccucccccacagggucuccugacgcuggagucagcggcuccaaauacgauguggccgcugaaggggaggacgaggaaagcguuucugccucccaaaaggcgauuaucuucaaacggcuuagcaaggaugccgugaaaaagaaggcuuguacccuggcccaguuucuccagaaaaaguucgagaaaaaggaaucuauucugaaagcugacaugcuuaagugcguccgcagagaguauaaacccuacuuuccgcaaauccugaaucggacgucccagcaucucgugguggccuucggagucgaacugaaggagauggacagcuccggcgagucuuauacccugguuagcaagcucggccugccuuccgaagggauucuuucuggagauaacgcccugcccaaaagcggccuccugaugucccuucugguggugaucuuuaugaaugggaacugugcuacagaggaagaggucugggaguuccucggacugcugggcaucuacgacgggauucuccacagcaucuauggagaugcgcgcaagauuaucaccgaagaccuggugcaggauaaauacguuguguacagacaggucugcaauucugacccucccuguuaugaguuucuuuggggcccccgggccuacgcugaaacaaccaagaugcgcgugcugagaguucucgccgauuccagcaacacgucuccuggccuguauccgcaucuuuacgaggacgcccugauugaugaaguggagcgggcucuccgccugagagccuga

SEQ ID NO: 3310 - RNA, 3429 nt, Artificial Sequence
  CCDS35417.1 variant
augggcgacaaggauaugcccaccgccgggaugccuagccugcuccaguccucuagcgaguccccgcaaucuugccccgaaggagaggacagccaguccccucugcagaucccccagucuagcccugaauccgaugacacacuuuacccccugcaaagcccucagucuagauccgagggcgaagauagcucugacccgcuccagcggcccccugaggggaaagauucccagagcccccugcaaauuccucagucuucccccgagggagacgauacgcagagcccgcuucagaacucccaaucuagcccugaaggcaaggacucccugagcccccucgagaucucucaguccccucccgaaggggaggaugugcagagcccccugcaaaauccugcuucuagcuucuuuuccucugcccugcucagcauuuuccaguccagcccggagucuacccagucccccuuugaaggauucccucagagcguccugcaaauccccguuucugcggcuuccagcuccacacuugugucuauuuuucagagcuccccugagucuacccagagccccuucgaaggcuuuccgcaguccccucugcaaauccccgugagccgcucuuucuccagcacacuccugucuaucuuucaguccagcccugagagaacccagucuacauucgaaggcuuugcccagagcccccuucaaauuccugucucccccuccucuuccagcacccugcucucccuguuccagucuuuuagcgagcggacgcaguccaccuucgagggguucgcccagucuagccugcaaaucccgguguccccuucuuuuagcuccacacucguuagccuguuccagucuucccccgaacgcacccagagcacauuugagggauucccccaaucuccucuucagauuccgguguccuccucuuccagcuccacccugcucagccuguuucagucuagccccgaaagaacgcacuccacauucgagggcuuuccucagucucuucugcaaauccccaugaccagcuccuucucuagcacacuccuguccauuuuucagucuagcccugaauccgcucagagcaccuucgagggguuuccccagucuccucugcaaauccccggauccccgagcuucucuuccacccuccugagccuuuuucaguccucuccugagcggacacauagcacguucgaaggcuucccccaguccccucugcagauucccaugaccagcucuuuuuccagcacacuccugucuauccuucaaagcuccccggagucugcccagagcgcuuucgaaggguuuccucaguccccucugcaaauccccgucucuagcuccuucagcuauacccuccugucucuguuucaguccagccccgagcgcacacacuccaccuucgaaggauuuccccagucuccucuccagauuccggugagcuccucuagcuccagcucuacgcugcuuucccuguuccaaagcucucccgaguguacacaguccaccuuugagggcuucccucagagcccccuccagaucccucaaucucccccugaaggcgagaacacccauagcccgcugcagauuguucccucccugccugaaugggaggacucucuuagcccccacuacuuuccucaguccccgccccagggggaggauagccucuccccucauuauuucccccaaucucccccucagggagaagacagccuguccccucacuacuuuccccagucuccgcagggcgaggacagccuguccccucacuauuucccccaaucucccccucagggggaagauagcaugagcccccucuacuucccgcagagcccucugcaaggagaggaauuucagucuucccuucagagccccgugucuaucugcuccagcucuacaccuuccagccugccccaguccuucccugagagcucucaaagcccgcccgagggcccuguccagagcccccuccauucuccccagagcccuccggaagggaugcacucccagucuccccugcaaagcccugaguccgcccccgaaggagaggacucucugagcccucuucagauuccccaguccccucucgaaggcgaggauagccugucuucccugcauuuuccgcagagcccucccgagugggaagacucucucagcccccugcacuucccucaauuucccccgcagggcgaggauuuccaguccucccuucaaucuccugugagcaucuguuccagcucuaccucccugagccucccccagucuuuucccgaaagcccucaguccccucccgaggggccggcgcagucuccccugcaaagaccugugagcuccuucuuuucuuauacacuggccagccuucuccaguccagccacgaaucuccccaguccccucccgagggaccggcucagagcccucugcaaucccccgucucuagcuucccuuccucuacgagcuccagccugucucaguccagccccguuucuuccuuuccuagcucuaccuccagcucucucagcaaauccagccccgaguccccgcugcagucuccugugaucagcuucuccucuagcacaucccuuucucccuucagcgaagaguccagcucucccguggacgaauacaccuccagcucugauacacugcucgaguccgacagccugaccgauucugagucccugauugaaagcgagccucuuuuuacguacacccucgacgaaaaggucgaugagcuggcccgguuccugcuccugaaauaucaggugaagcaaccgaucacaaaggcugaaaugcuuaccaauguuauuucucgcuacacaggcuauuuucccgugaucuucagaaaagcccgggaguuuauugagauccuguucgggaucucccuccgcgaagucgacccugacgauagcuacguguuuguuaacacccuggaccugacgagcgagggaugccuuuccgaugaacagggcaugucucagaauagacugcucauucugauccucagcauuaucuucauuaaggggacauaugcguccgaggaagugaucugggacguccugucuggcauuggagugcgggccggccgcgagcauuuugcuuucggggagcccagagaacuucugaccaaagucugggugcaggagcacuaccucgaauaucgggagguuccuaacagcucucccccuagauacgaauuucuguggggaccccgcgcccauuccgaggugaucaagcggaaagucguggaguuccuggcuaugcuuaagaauacaguuccgaucaccuuuccuagcuccuacaaggaugcccugaaagacguggaagagagagcccaagcuauuaucgauaccacagacgauagcacggcgaccgaaucugccuccagcucugucaugucccccagcuucuccucugaguga

SEQ ID NO: 3311 - RNA, 1122 nt, Artificial Sequence
  AAF07210 variant
augcccccugugccgggcguccccuucagaaacguugacaaugauagcccuaccuccguggagcuggaagacuggguggaugcccagcaccccacagacgaggaagaggaagaggcuucuagcgccuccucuacgcucuaccuggucuuuagcccuuccucuuucagcaccuccagcucucuuauccucgggggacccgaggaagaggaagugccuuccggcguuauuccgaaccugacagagagcauccccucuuccccuccccaagggccuccccagggaccgagccagucuccucuguccagcugcuguuccucuuuuagcugguccagcuucucugaggaauccagcucucagaagggcgaggauaccgggacaugccaaggacuucccgacagcgaauccucuuuuaccuauacacuggaugagaaaguggcggaacucgucgaguuccugcugcucaaguacgaggcugaagaaccugugaccgaagccgagaugcugaugauuguuaucaaauauaaggacuacuuucccgugauucuuaaacgggcccgcgaguucauggagcugcucuuuggccuggcucuuaucgaggucggccccgaucauuucuguguguuugccaauacgguggggcugaccgacgaaggaagcgaugacgagggcaugccugaaaacucccuccugaucauuauccugagcgucauuuucaucaaggggaauugcgcuucugaggaaguuauuugggaggugcucaacgccgugggagucuaugcgggcagagagcacuuuguguacggggaaccgcgggagcugcuuacaaagguuugggugcagggacauuaucuggaauaccgcgaggucccccacuccagcccucccuacuaugaguuccucuggggcccuagagcccauucugaauccaucaaaaagaaagugcuggaguuccuugcuaagcugaauaacaccguucccagcuccuuuccgucuugguacaaagaugcccucaaggacguggaggaacggguccaggcuacaauugacaccgccgaugacgcgacggugauggccagcgaaucccugucugucaugagcuccaaugugagcuucucugaguga

SEQ ID NO: 3312 - RNA, 1932 nt, Artificial Sequence
  AAM08355 variant
augcugcuccccugccacugggugcuggacgccaccuucagcgauggcucccuugggcagugggucaagaacacaugugcuacguacgcccugucuccuguugugcucccgccccaaccucagccccggaaaaaggcgaccgacaaagauuauagcgcuuuucaucugggacaccuuagagaggugcgccuguuccucagaggcgggacauccgaccagcggauggauucucugguccugugcccuaccuacuuuaagcucuggcgcacacugagcggaucccccggccuucagcugucugaccuccauuucgggagccaaccugaaggaaaauuuucccugagacgggccgugagcguuaagcagcgcgaggaaccgcaggauuggccccuuaaugagaagagaacccuguggaaagacucugaucucccuacauggcggcgcggcaccggcuauacgcugucccugcccgccgugagcccugggaagagacucuggggagaaaaagcuggcucucugcccgaguccgagccgcuuuucaccuacacacuggacgaaaaggucgauaaacucgugcaguuucugcuucugaaguaucaagccaaggagccucucacccgggcugaaaugcagaugaacguuaucaauacauacaccggguauuuccccaugauuuuucgcaaagccagagaguucaucgagauucuguuuggaaucagccugacggaaguggacccugaucacuucuacgucuuugugaacacacucgaccugaccugugagggcucucuuuccgacgaacaggggaugccccagaaucggcugcucauucugauccuuagcgugaucuucauuaagggaaacugcgcguccgaggaagucaucugggagguucugaaugccauuggccccuggucugcucucgccggcuucgcugaugugcugagccgccuggcccucugggaguccgaagggccugaggcguuuugugaagagagcggacugagaucugccgaaggcuccgugcuugaccuggcuaacccgcaagggcucgccggacaucggcaggaggauggcagacgcgggcugacagaggcuagcccccagcagaaaaagggaggcgaagacgaggauaugccugccgccggcaugcccccucugccccaaucuccgccugaaauucccccucaggggcccccuaaaaucagcccccagggaccgccucaauccccuccccagucuccccuugacagcugcuccagcccgcuccuguggacccggcuggaugaggaaucuuccagcgaggaggaagacaccgcuacauggcacgcgcuccccgagucugaaucccugccuagauacgcccuugaugagaaggucgcugagcuggugcaguuccuccugcugaaauaucagacgaaggaacccguuaccaaggccgagaugcuuacaaccgugaucaaaaaguacaaagacuauuuuccuaugauuuucggcaaggcccacgaauuuaucgagcucaucuucgggauugcucugacagauauggaccccgacaaucauagcuacuuuuucgaagauacccuggaccucacguaugagggaucccugaucgaugaccaaggcaugccuaaaaacugucuucugauucucauccugucuaugauuuuuaucaaggggagcugcguccccgaggaagugaucugggagguucuguccgccauuggcccgauccagcgcccugcgcgggaagugcuugaguuccucucuaagcugagcuccauuauccccagcgcuuuuccuucuugguacauggaugcccugaaagacauggaagauagagcccaggcuauuaucgacacaaccgaugacgccaccgcuauggccuccgcgagccccucugucauguccacaaauuucuguccggaguga

SEQ ID NO: 3313 - RNA, 2337 nt, Artificial Sequence
  AAG23757 variant
auggcccagaagauggacugcggcgcugggcugcucggauuccaagccgaggcgagcguggaagauuccgcucugcuuaugcagacccugauggaggccauccagauuucugaagcucccccuacaaaccaggcuacggccgcugccagcccgcaauccucucagcccccuaccgcgaaugagauggccgacauccaggucagcgcugccgcugccagacccaaauccgcguuuaagguucagaacgccacaaccaaaggcccuaaugggguguacgauuucucucaagcucacaacgccaaggacgugcccaauacacagccuaaagcugccuuuaagagccagaacgccaccccgaagggacccaaugcugcguaugauuucucccaggccgcuacaaccggcgaacucgccgccaacaaaagcgagauggcuuuuaaggcccaaaaugcgacgaccaaagucgggccuaacgcuacauacaauuucucucagucccugaacgccaaugaccuugccaacagccggcccaagaccccuuuuaaagccuggaaugauacaaccaaggcccccacggcugacacacagacccaaaacgugaaccaggccaagauggcgacaucucaggccgauauugagaccgacccgggaaucuccgaaccugauggcgcuaccgcccagacaagcgcugacggcucucaagcccagaaucuggagucccgcacgauuaucagagggaaacggacccgcaagaucaacaaucucaacguugaagagaauagcuccggagaucagagacgggcgccccuggccgcuggcacauggcgcucugccccugugcccgucaccacacagaaucccccuggggcuccgcccaacgugcuguggcaaaccccucucgccuggcagaaccccagcggauggcagaaucagacggccagacaaacaccucccgcucggcaguccccgccugcgcgccagaccccucccgccuggcagaaccccguugcuuggcaaaauccugugauuuggcccaacccggucaucuggcagaauccugugauuuggcccaaccccaucguguggccuggcccggucguuuggcccaauccucuggccuggcagaaucccccuggguggcaaaccccucccggauggcagacacccccgggcuggcagggcccucccgacuggcaggggccucccgacuggccgcuuccucccgauuggccucugccucccgacuggccccucccgaccgauuggccccugccucccgacuggauuccugccgauuggcccaucccuccggacuggcaaaaccuuagacccagcccuaaccugcggcccucuccuaacucccgcgcuagccagaaucccggagccgcgcagccgagagauguggcucuccugcaggagcgggccaacaaacuggugaaguaucucaugcugaaagacuacacaaaggucccuauuaaacgcucugaaaugcuuagagauaucauccgggaguauacggacguguaccccgaaauuaucgagagagccuguuucguucuggaaaagaaguuuggcauucaacucaaagagaucgauaaggaggaacaucuguauauucuuaucagcacccccgagucccuggcugggauccucggaacaaccaaagacacaccuaagcugggccugcuccuggugauucuuggggucaucuucaugaauggaaaccgcgccucugaagcggugcugugggaggcucuccggaaaaugggccugagacccggcguucgccacccucuucugggggaccuccggaagcugcugaccuacgaauuugugaagcagaaauaccucgauuauagacgcgucccgaauagcaaucccccugaguacgaguuccuguggggacuucgguccuaucaugaaacgagcaagaugaaagugcugagauuuauugccgagguccagaagcgcgacccccgggauuggaccgcccaguucauggaagcugccgacgaggcucucgaugcccuggacgcggccgcugccgaagcugaggccagagccgaggcucgcacacggaugggcaucggggaugaagcggugucuggaccuugguccugggacgauauugaguucgaacugcuuaccugggacgaggagggcgauuuuggggaccccuggagcagaaucccguucacauuuugggcccgguaccaccaaaacgcucgcucuagauucccucagaccuuugccggccccaucauuggaccuggcgggacggccuccgcuaacuucgccgcgaauuuuggagcuaucggcuucuuuuggguugaauga

SEQ ID NO: 3314 - RNA, 1821 nt, Artificial Sequence
  AAD28598 variant
augagcgacaccuccgagucuggcgccgggcugacaagauuccaggcugaagccagcgagaaggauuccucuagcaugaugcaaacgcuccugaccgugacacagaacgucgaaguucccgagaccccuaaagcguccaaggcucuugaagugucugaggacgugaaagucagcaaggccuccggagugagcaaagccacagagguuucuaagaccccggaagcucgggaggcccccgcuacacaggccuccagcaccacgcagcugaccgauacacaagugcucgcggccgaaaauaagucucuggcugccgacaccaaaaagcagaacgcugauccucaggccgucacaaugcccgcgaccgagacgaaaaaggugucccacguugccgacacaaaagugaauaccaaggcucaggagacagaagccgcuccuagccaagcccccgccgaugagccugaaccggagucugcugcggcccagucccaggaaaaccaggacacccgccccaaggucaaagcuaagaaagccagaaaggugaaacaucuugauggcgaggaggacgggagcuccgaucaaucucaggccagcggaaccacaggcgggcggcgcguguccaaggcucugauggccagcauggcgagacgggcuucucgcggaccuaucgccuuuugggccagacgggcuucccgcacgagacucgccgcuugggcccggcgcgcgcugcugagccucagaucucccaaagcccggcgcggcaaggcuagacggagagccgcuaagcugcagagcucccaagaaccugaggccccgccgccucgcgacgucgcgcuucugcagggccgggccaaugaucucguuaaauaccugcuugcuaaggaccagaccaaaauucccaucaagagaucugacaugcugaaagauauuaucaaggaauauacagacguguacccugagauuaucgaacgcgccggguauagccucgagaagguguucggaauccagcugaaagagauugauaagaacgaccaccuguacauccuccuguccacccuugaacccacagaugcuggcauucuggggaccacgaaagacagccccaagcucggacugcuuaugguccugcucucuaucauuuuuaugaauggcaaccgguccagcgaggccgugaucugggaaguucugagaaaacuggggcuccgcccuggcauucaucacucucuguucggagaugugaagaaacuuaucacagacgaguuugucaagcaaaaguaucuggauuacgcccgggugcccaauuccaaucccccugaauaugaguucuuuuggggccucagaagcuacuacgagaccuccaaaaugaagguucugaaauucgcuugcaaggugcagaagaaagaccccaaggaaugggcggcccaguaucgcgaggcuauggaagccgaucuuaaagccgcugccgaggcggcugccgaggccaaggcucgggccgaaaucagagcgcgcauggggauuggacugggcucugagaacgcugccgggccuuguaacugggacgaagccgacaucggacccugggcuaaagcccggauucaggcuggcgccgaggcgaaggccaaagcucaagaaagcggguccgccucuaccggagcuagcacauccaccaauaacagcgccucugccuccgcuagcacaucuggcggcuuuuccgcgggggccagccucacggcuacccugacauucggacuguuugccggccucgggggagccggcgcuucuaccagcggguccagcggcgccugcggauucucuuacaaguga

SEQ ID NO: 3315 - RNA, 2226 nt, Artificial Sequence
  AAH63838 variant
auggccgagggcagcuucuccgugcagucugaaagcuacuccgucgaggacauggaugaagggucugacgagguuggagaagaggagaugguggaaggcaacgauuaugaggaauuuggggcuuucggaggcuacgggacccugacauccuuugacauccacauucucagagccuucggaucccugggccccggccuucggauccugucuaaugagccuugggagcucgaaaacccggugcuggcgcaaacgcuugucgaggcucugcagcucgaucccgaaacccuggccaaugagacagccgcucgcgccgcuaacguggccagagcggccgcuagcaaucgggccgcucgcgccgcggccgcugccgcuagaaccgccuuuucccagguuguggccagccaucgggucgcuacaccucaggugucuggggaagacacccaacccacaaccuaugcggccgaggcucagggaccuacgcccgagccuccgcuggccagcccccagaccagccagaugcucguuacaucuaagauggccgcuccugaagcccccgcgaccuccgcucaaagccagacaggcucuccugcccaggaggccgcuaccgaagggcccuccagcgccugcgcuuucucccaggccccgugugcgcgcgagguggaugccaacagaccuucuacggcuuuucugggacaaaaugacgucuucgauuuuacacagcccgccggcgugagcgggauggcuuucccucggcccaaacgccccgccccugcgcaggaagccgcuaccgagggaccguccgccgcuagcggcgugccccaaacaggcccugggagagaggucgccgccacccggcccaagaccacaaaaucuggaaaggcucuugcgaaaacgcgcuggguugaaccucagaacgugguggccgcugccgccgcuaaggccaagauggcgaccuccauucccgagccggaaggcgcugccgccgcuacagcccagcacagcgcggagccuugggcuagaaugggagggaaacggaccaagaaaucuaagcaucuggacgaugaauacgagagcuccgaggaggaacgcgaaacacccgccgucccucccaccuggagagccucucagccuagccucacggugcgggcucaacuggcccccagaccgccuauggcuccccgcucccagauccccagccggcacguucuuugccugccuccgagaaaugugacacuccugcaggagcgcgccaacaaacuggucaaguaucucaugauuaaggacuacaaaaagauccccaucaaacgggcggauaugcugaaggacgugauuagagaguaugacgaacauuuuccugagaucauugaacgcgccaccuacacccuugagaaaaaguucggcauccaccugaaagaaauugauaaggaggagcaccucuacauccugguuuguacacgggacucuuccgcuagacuucuggggaagaccaaagauacaccccgccucagccugcugcucgugauucugggagucaucuuuaugaauggcaaccgggccucugaagcugugcuuugggaggcccugagaaagaugggccuccgcccugggguccggcaucccuuccugggagaccuuagaaaacugaucacggaugacuucgugaagcagaaauaucucgaauacaagaagauuccuaauuccaaucccccggaguaugaauuucuguggggccugcgggcccgccacgagaccagcaaaaugagaguucuccgguucaucgcucaaaaucagaacagagauccucgcgaguggaaggcgcauuuucuggaagccguggacgaugcuuucaaaacaauggacgucgauauggccgaggaacacgcccgggcucagaugagagcccagaugaacauuggggacgaggcgcuuaucggacgcugguccugggacgauauucaaguggaacugcucaccugggacgaggauggcgacuuuggggaugcuugggccagaauccccuucgccuuuugggcucgguaccaccaguauauccugaacucuaaccgcgccaauagacgggcgacauggcgcgcuggcguuagcuccggaaccaacggcggggccucuacgagcgugcuggacggaccuuccaccagcucuacaauuagaacccggaaugccgcucgcgccggcgcuuccuucuuuagcuggauccagcauagauga

SEQ ID NO: 3316 - RNA, 1122 nt, Artificial Sequence
  CAG33449 variant
augcccccugugccgggcguccccuucagaaacguugacaaugauagcccuaccuccguggagcuggaagacuggguggaugcccagcaccccacagacgaggaagaggaagaggcuucuagcgccuccucuacgcucuaccuggucuuuagcccuuccucuuucagcaccuccagcucucuuauccucgggggacccgaggaagaggaagugccuuccggcguuauuccgaaccugacagagagcauccccucuuccccuccccaagggccuccccagggaccgagccagucuccucuguccagcugcuguuccucuuuuagcugguccagcuucucugaggaauccagcucucagaagggcgaggauaccgggacaugccaaggacuucccgacagcgaauccucuuuuaccuauacacuggaugagaaaguggcggaacucgucgaguuccugcugcucaaguacgaggcugaagaaccugugaccgaagccgagaugcugaugauuguuaucaaauauaaggacuacuuucccgugauucuuaaacgggcccgcgaguucauggagcugcucuuuggccuggcucuuaucgaggucggccccgaucauuucuguguguuugccaauacgguggggcugaccgacgaaggaagcgaugacgagggcaugccugaaaacucccuccugaucauuauccugagcgucauuuucaucaaggggaauugcgcuucugaggaaguuauuugggaggugcucaacgccgugggagucuaugcgggcagagagcacuuuguguacggggaaccgcgggagcugcuuacaaagguuugggugcagggacauuaucuggaauaccgcgaggucccccacuccagcccucccuacuaugaguuccucuggggcccuagagcccauucugaauccaucaaaaagaaagugcuggaguuccuugcuaagcugaauaacaccguucccagcuccuuuccgucuugguacaaagaugcccucaaggacguggaggaacggguccaggcuacaauugacaccgccgaugacgcgacggugauggccagcgaaucccugucugucaugagcuccaaugugagcuucucugauuga

SEQ ID NO: 3317 - RNA, 2874 nt, Artificial Sequence
  AAM08354 variant
augagccuggugucccagaacucuagacggcgcagacggcgcgucgccaaggcuaccgcccacaauagcuccuggggcgagaugcaagcgcccaacgcuccugggcucccggccgacguucccggaucugaugugccucagggccccagcgacucccagauccugcaggggcuuugcgccucugaaggaccuagcacauccgugcugcccacgagcgcugagggcccuucuaccuucgucccgcccacaauuuccgaagccagcucugcuuccgggcaaccuaccaucagcgagggacccggcacaucugugcucccuacccccuccgaaggccugagcacauccgggccgccuaccauuucuaaaggacuuuguacgagcguuacccuggccgcguccgagggcagaaauacaagccggcccccuaccucuuccgaggaacccagcacaucugugcccccuaccgccagcgaggucccguccacgucucugcccccuacacccggggaaggaaccagcacauccgugccucccaccgcuuacgagggcccgagcaccucuguugugccuacacccgaugaggggccuuccacgagcguccuccccaccccuggagaaggccccggcacaucugugccgcuggccgcuaccgaggggcucuccacaagcgugcaggccaccccugacgaaggacccuccacgucugugcccccuacagcgaccgagggccugagcaccccgguucccccuacacgcgaugaagggcccuccaccucugugccugccacacccggagagggcccuagcacguccgugcuucccgcugccagcgacgggcagucuaucucccuggucccgaccagaggaaagggcagcucuacauccgugccucccaccgcuacagagggccucagcaccucuguucagccuacggccggggaaggaagcuccaccagcgugcccccgacaccuggcgggggacugucuaccuccgugcccccuacagccaccgaggaacuuagcacguccgucccucccacacccggcgaggggccgucuaccagcguucugcccauuccuggcgaaggacucuccacaucugugcccccuaccgcuagcgauggcuccgacaccucugugcccccuacaccgggggagggagcgagcacgcugguccaacccaccgccccugauggccccggguccagcguccugccuaaccccggagagggcccgucuacacucuuuuccagcucugcuuccguggaccggaauccuagcaaaugcucucugguucuucccagcccccgcgugaccaaggccuccgucgauuccgacagcgaagggccuaaaggcgccgagggacccaucgaguucgaagugcugagagauugugaaucuccuaacagcaucuccauuaugggccucaauacaucucggguugcuaucacccugaagccgcaggaccccauggagcagaacguggccgagcuucugcaguuucuccuggucaaggaccaaagcaaauauccuauucgcgaauccgagaugagagaauacaucgugaaggaguaucggaaucaguuccccgagauucugcgcagagcggcugcccaucucgaaugcaucuuucgguucgagcugagagaacuugauccugaggcccacacguacauucugcucaacaaacuggggcccgugccguuugaaggacuugaggagucuccuaauggccccaagauggggcugcucaugaugauccugggacagaucuuccugaacggcaaucaagcuaaagaagccgagauuugggaaaugcucuggcgcauggggguucagcgggagagacgccugagcaucuuuggcaacccuaagcggcuucuguccgucgaguucguguggcagagauaucucgacuaccgccccgugacagauuguaagccugucgaauaugaguuuuucuggggaccccggucucaucuggaaaccaccaaaaugaagauucugaaauuuauggcuaagaucuacaauaaagacccgauggauuggccugagaaguacaacgaagcccuugaggaagacgcggccagagcuuucgccgagggcuggcaggcucucccccacuuccgccggcccuuuuucgaggaagccgcggccgaggugccuagcccggauuccgaaguuagcucuuauuccagcaaauacgcuccccauucuuggccugaguccagacuggagagcaaggcccgcaagcuggugcaacucuuucugcuuauggacuccacaaaacugcccauuccuaagaaagggauccucuauuacaucggacgggaaugcucuaaggucuuccccgaucugcugaacagagcugcccggacccuuaaucacguguauggcacagagcucguugugcuggacccucgcaaccacagcuacacgcuguauaauagacgggaaauggaggaaaccgaggagauugucgauuccccgaacagacccgggaauaacuuucucaugcagguccugagcuucaucuuuauuaugggaaaucaugcccgcgaaucugcuguuugggcguuccuucggggccugggggugcaggccggcagaaaacacgucaucacaugucgcuaccucucccagagauacauugacagccugcgggugccugacucugaucccgugcaauaugaguuugucuggggaccucgcgcuagacuggaaaccagcaagaugaaggcccuucgguacguugcccgcauccauagaaaagagccccaggacuggccgcagcaguaucgggaagcuauggaggaugaggccaaccgcgcggacgugggccacagacaaaucuucgugcacaauuuucgguga

SEQ ID NO: 3318 - RNA, 1572 nt, Artificial Sequence
  AAH93964 variant
augagccuggugucccagaacgccagacacugcucugcugagaucaccgccgacuacggcgaugggcggggagaaauucaagcgacaaaugcuagcggcucccccacgucuaugcucgucguugacgccccucaguguccgcaggcccccaucaacagccagugcgugaauaccucccaagcugugcaggauccuaacgaccuggagguccuuauugaugaacagucucgcagacugggggcccuccgggugcaugacccccuggaggaucgcagcaucgcucuuguuaauuucaugagaaugaagucccagacagaaggaagcauucaacagucugagaugcuggaguuucuccgggaauauuccgaccaguucccugagauccugcgcagagccagcgcgcaccuggaucagguguuuggccucaaccugcgggucaucgacccccaagccgauaccuacaaucuugugucuaaacgcggguuccagauuacagacagaaucgcugaaucccuggauaugccuaaggccagccuccuggcucuuguucugggacauauucuccugaacggcaaucgggcccgcgaggcgucuaucugggaccugcuccugaaaguggacaugugggauaagccgcagagaauuaacaaucuuuuuggcaacacccggaaucugcucacaaccgacuucgucuguaugcgcuuucuggaguauuggcccguguacgggacgaacccucuugaguucgaguuucuguggggauccagagcccaccgggaaaucaccaaaauggaggcucucaaguucgugagcgaugcccaugacgaagaacccugguccuggccugaggaauauaauaaggcucuggagggcgauaaaacaaaggaaagaucucugaccgccgggcucgaguuuuggagcgaagacacaaugaacgauaaagccaacgaccugguccaacuugcuauuuccguuaccgaggagaugcugcccauccaccaggaugaacuccuggcgcacacgggaaaggaguucgaagacguguuuccgaauauccuuaaccgcgccacacugauucucgauauguucuacggccugagccugaucgagguggacaccucugaacauauuuaucuccugguccagcagccugaguccgaggaggaacaagugaugcuugaaagccuggggcggcccacacaggaguacguuaugccuauccucggacugauuuuccugaugggcaauagagugaaagaggcuaacgucuggaaucuucuccgccgguuuucuguggacguuggcagaaagcacagcaucacccgcaagcugaugcggcagagauaccuggaaugccgcccccucuccuauucuaaccccguggaguacgaacugcuuugggggccucgggcccaucacgagaccaucaaaaugaagguccuggaauauauggccagacucuaccgcaaacggccgcagaauuggcccgagcaauauagagaggcuguggaagaugaggaagcccgggcuaagagcgaggcgacaauuauguucuuucuggacccuacguga

SEQ ID NO: 3319 - RNA, 924 nt, Artificial Sequence
  CCDS3269.1 variant
augcugcagacccccgagagcagaggccucccugugccgcaagccgaaggggagaaggacggaggccacgauggggaaacacgggcucccacggccucccaggagcgcccuaaagaagaacugggagcgggcagagaggaaggggcugccgagcccgcccuuacccggaagggagcucgcgcccuggcugccaaagcgcucgccagacggcgcgcuuacagacggcugaaccgcacagucgccgaacuuguucaguuccugcucgugaaggacaaaaagaagucuccuaucaccagaagcgagauggugaaauaugucauuggcgaucugaagauccuguuucccgacauuaucgcucgggccgcggagcaucuccgcuacguguucggcuuugaacugaaacaguucgauagaaagcaccauacauauauucuuaucaauaaacugaagccucucgaggaagaggaagaggaggaccuugggggagauggcccgcggcuggggcugcucaugaugauccugggacugauuuacaugcgcggcaacuccgccagagaagcucaaguuugggagaugcuccggagacugggggugcagcccucuaaguaucacuuucuuuucggauacccuaaacgccugaucauggaagacuuuguccagcagcgguaucucagcuacagacgcgugccccauaccaauccucccgaguacgaguucuccuggggcccgcggucuaaccuggagauuagcaagauggagguucuuggcuuuguggccaaacugcacaagaaagaaccucaacacuggcccguccaguauagagaggcucucgccgaugaagccgaccgcgcucgggcgaaggccagagcugaggccuccaugcgcgcccgggcuagcgccagagcggggauccaucugugguga

SEQ ID NO: 3320 - RNA, 660 nt, Artificial Sequence
  AAD31314 variant
augcccagaggccggaagucucgcagacggcgcaacgccagagcugccgaggaaaaucggaacaaucgcaaaauccaggcguccgaggcuucugaaaccccuauggccgccagcguggucgcuuccacaccggaggacgaucugucugggcccgaagaggacccuagcacgcccgaggaagccuccaccacaccugaggaagcuagcagcaccgcccaagcgcagaagcccuccguuccuagaagcaacuuccagggaacaaagaagucucuccugauguccauucuugcccugaucuuuauuaugggcaauagcgcuaaagaggcccucguguggaaggugcuggggaaacuuggaaugcagccgggccggcaacacucuaucuucggggaucccaaaaagauugucaccgaggaauuugugcgcagaggauaccugaucuauaaaccuguuccccgguccagcccuguggaguacgaguucuuuuggggcccccgcgcucaugucgaaucuuccaagcucaaagugaugcacuucguugccagagugcggaaccgcugcagcaaggacuggccguguaauuaugauugggacuccgaugacgaugcggaagucgaggccauccugaacucuggcgcuagaggguacagcgccccuuga

SEQ ID NO: 3321 - RNA, 3750 nt, Artificial Sequence
  CCDS73700.1 variant
augagccagcuguccaagaaccucggcgacucuagcccgccugccgaggcuccgaaacccccuguguacuccagacccaccguccugaugcgggccccucccgcgucuagccgcgcuccuccgguucccugggauccucccccuaucgaccuucaagccucccuggccgcuuggcaggcgccccagccggcuugggaagccccucaggggcaacuccccgcgccuguggugcccaugacacagcccccugcccugggaggcccgauuguccccgcuccuccccuugggggaccuaugggcaagcccccgacgccuggggugcugaugguucaucccccucccccuggagcccccauggcucagccgccuacccccggcgugcucaugguccaccccucugccccuggcgcgccgauggcccaucccccucccccugggacacccaugagccacccucccccgccuggaacccccauggcucacccucccccgccuggcacacccauggcccauccuccuccgcccgggacccccauggugcaucccccucccccuggaacacccauggcucacccuccgcccccuggcacccccauggcccacccucccccgccugggacgcccauggcccaucccccucccccuggaaccccgauggcucaucccccucccccuggcacacccauggcgcagccgccugcccccggcguucugauggcucaaccucugacccccggggugcucaugguccagccugccgcccccggagcuccgauggugcagccuccucccgccgcgaugaugacacagccccaaccguccggcgcucccauggccaaaccucccgggccuggagugcugaugauccaucccccuggcgccagagcuccgaugacccagcccccugccagcggggcucccauggcccagccugcggcucccccggcccaaccuauggccccucccgcucagcccauggccucuugggcgccccaggcccagccucuuauucugcaaauccagucccaggucauucgggcuccgccccagguuccucaaggaccccaggccccucccgcucagcucgccacgccgccuggcuggcaggccacaagccccggcuggcaagcuacccagcagggguggcaggcgacaccucugaccuggcaaaccacacaggugacguggcaggcccccgcugugaccuggcaagucccucccccgaugcgccagggaccuccucccaucagacccggcccgcccccuauccggcccgggccucccccugugcgccaggcucccccgcuuauuagacaggccccucccguuauccggcaagccccucccgugauucgccaggccccgccugucaucagacaggcgcccgcugugauucggcaggcucccccuguuauccgccaagcgcccccugugauuagacaggccccgcccgucauccggcaggccccuccccugauccgccaggccccucccccuauuagaccggcuccccaagugcucgccacacagccuccccuguggcaggcccugccucccccgccuccccuccggcaagcuccccaggccagacugccugcuccccagguccaggccgcgccucaagugccgaccgcucccccugccacacagguucccgccgcuccucccgccggaccccaggugccucagcccguccuuccugcuccccugucugccccgcucuccgcgccucaagccgugcacugccccagcaucauuuggcaggcucccaagggccagccucccguuccucacgagaucccgaccucuauggaguuccaggaagugcaacagacgcaggcccuggccuggcaggcucaaaaagcccccacacacauuuggcagccucuucccgcgcaggaagcucaacgccaggccccuccccugguccagcucgagcagccuuuucaaggggccccgcccucccagaaggcugugcagauccagcugccuccccaacaggcccaggcgagcggcccucaggcugaggugcccacccugccgcuccaaccuuccuggcaggccccucccgccguucugcaggcucaacccggacccccugucgccgcugccaauuucccgcuuggcucugccaagagccugaugacccccuccggggaaugucgggccagcucuaucgauagacgcggauccagcaaagagcggagaacaucuagcaaggaacgccgggcuccuuccaaagacagaaugauuuuugccgcuaccuucugcgcccccaaggccgugucugcugcgcgcgcccaccucccugcugccuggaaaaaccugcccgccacaccggagacguuugcuccuagcuccagcguguuccccgccaccucucaguuucagccugcgucccuuaaugcuuucaagggccccagcgccgccucugagacaccuaagucccugcccuaugcucuccaggauccguuugccugugucgaagcgcugcccgccgugccuuggguuccccaaccuaacaugaaugcuagcaaagccucccaggcugugccgaccuuccugauggccacagcugccgcgccccaggccaccgcuacgacccaggaggccucuaagacaagcgucgaaccuccccggagauccgggaaagcuacccgcaagaaaaagcaccucgaggcccaagaagacucucggggacauacacuggccuuucacgauuggcagggcccuagacccugggagaaccuuaaucugagcgacugggaggugcaguccccuauccagguuagcggggauugggaacaccccaacaccccgcggggccucucuggaugggagggcccuuccacgagccgcauucugucugggugggaaggacccuccgcuagcugggcgcugucugccugggagggcccuagcacauccagagcucuugggcucagcgaaucucccggauccagccugccgguggucguguccgagguugccucugugagcccuggcuccucugccacccaagacaauagcaaagucgaggcucagccccugucuccccucgaugaacgggccaacgcgcuggugcaguuccuucuggugaaggaccaggccaaggucccuguucaaagauccgagauggugaaagugauccuccgcgaauacaaggaugagugccuggacauuaucaaucgggcuaacaauaaacuggaaugugccuuuggguaucagcuuaaggagaucgacaccaaaaaccaugcuuacauuaucauuaauaagcucggcuaucacacaggaaaccuggucgccagcuaccuggauagacccaaguucggccuccugauggugguucuuucccugaucuucaugaaagggaacugcgugcgcgaggaccucauuuuuaauuuccuguuuaagcugggacuugaugucagagaaaccaacggccucuucgggaauacgaaaaagcugaucacagagguguuuguucggcagaaauaucuggaauaccgccggauuccuuacaccgagccggcggaguaugaguuccucuggggacccagagccuuucuggaaacaagcaagaugcuugugcugcgcuuccucgcuaagcugcauaaaaaggacccucaaucuuggcccuuucacuaccuggaagcccuugcugagugugaaugggaggauaccgacgaggaugaaccugacacaggcgauuccgcccacgggcccaccagcagaccgccuccccgguga

SEQ ID NO: 3322 - RNA, 282 nt, Artificial Sequence
  AAC39608 variant
augaagcugcucauggugcugaugcuugccgcucugagccagcacugcuacgccggcuccggguguccccuccuggagaacgucaucucuaaaaccauuaauccucaaguuagcaagacagaauauaaagagcuucugcaggaauuuaucgacgauaacgcgacgaccaaugcuauugacgagcucaaggaaugcuuucugaaccagacagaugagacccuguccaauguggagguguucaugcagcucaucuacgacucuagccugugugaucuuuucuga

SEQ ID NO: 3323 - RNA, 363 nt, Artificial Sequence
  AAH67220 variant
augaagcugcucauggugcugaugcuugccgcucugagccagcacugcuacgccggcuccggguguccccuccuggagaacgucaucucuaaaaccauuaauccucaaguuagcaagacagaauauaaagagcuucugcaggaguucaucgacgauaacgcgacgaccaaugcuauugacgaacucaaggaaugcuuucugaaccagacagaugagacccuguccaauguggagguguucauggucaucucuuuuagcuccuacaaacucuucaagucuccggaccagggacaagugggcagcuccuuucugacagauaacgccaaggccaccagcgaacaggcuuucucuuauauuggguga

SEQ ID NO: 3324 - RNA, 357 nt, Artificial Sequence
  AAA19238 variant
augcccagagaggacgcccacuucaucuacggcuauccuaagaaagggcauggacacagcuacaccacagcugaagaggccgcgggcauugggauccugacggugauucucggaguccugcuucugaucggcugcugguauugucggcgcagaaacggguaccgggcucucauggauaagucccugcauguuggaacccagugcgcccuuacacgcagauguccgcaagaaggcuuugaccaccgggauucuaaagugagccugcaggagaagaauugcgaacccguggucccuaacgcucccccugccuaugagaaacucuccgccgagcagucucccccuccguacagccccuga

SEQ ID NO: 3325 - RNA, 1482 nt, Artificial Sequence
  EAW93427 variant
augcugcccagaugggagcucgcccuguaccuucuggcuagccucggcuuccacuuuuauuccuucuacgaaguguauaaggucucucgggagcaugaagaggaacuggaccaggaguuugagcuugaaaccgauacacuguucgggggacucaaaaaggacgccacggauuuugaguggagcuucuggauggaauggggcaaacaauggcugguuuggcugcuccuggggcacaugguggugucccagauggcgacccuucuggcucgcaagcauagaccuuggauccucaugcuguacggaaugugggccugcugguguguccuuggcacaccggggguggccaugguucugcuccacaccacaauuucuuuuugcguggcucaguuccggagccagcugcugaccuggcucuguucccugcuucugcucucuacacugcgccuucaaggagucgaggaggugaaaagacggugguauaagaccgaaaacgaguacuaucugcuccaguuuacgcugaccguucgcugccuguacuacacauccuucucccucgaacuguguuggcagcagcuucccgccgcuagcaccucuuauuccuuuccuuggaugcuggccuacguguucuauuaccccguccuccauaauggcccuauccugagcuuuucugaguucauuaagcaaaugcagcagcaggaacacgacucccuuaaagcgagccugugcgugcucgcccugggccuggggagacuccuguguuggugguggcuugcugagcugauggcccaccucauguauaugcaugcuaucuacucuuccauuccccugcuggagacagugagcugcuggacccuuggaggccucgcccuggcgcaaguccuguucuuuuauguuaaguaccucgugcuguucggggugccugcccuucugaugcggcucgauggacugacgccgcccgcucugccucgcugugucuccacaauguuuucuuucaccggcauguggagauacuuugacguggggcuucacaacuuccucauccgguauguuuacauccccgugggaggcagccagcauggccugcuggggacacucuuuuccaccgccaugaccuucgcuuuugucagcuauuggcacggaggcuacgauuaucuguggugcugggccgcccuuaauuggcugggggugacaguugaaaacggagugcgcagacucgucgagacgccuuguauucaggacucucuggcucgguacuucagcccccaagcgcgcagacgguuucacgccgcucuggccagcugcucuaccagcaugcuuauccucuccaaucugguguuccugggcgggaacgaagucggaaaaacauauuggaauagaauuuuuauccagggcuggccgugggugacccucucuguucugggcuuccuuuacugcuacagccauguggggauugccugggcucagacauaugccaccgauuga

SEQ ID NO: 3326 - RNA, 954 nt, Artificial Sequence
  AAD41349 variant
auggccgugcagggcagccaaagacggcugcucgggucccugaacucuacccccacagcuaucccucagcuuggacuggccgcgaaucagacgggcgcucgcugccucgaggucagcauuuccgacgggcuguuccuuucucugggacucguuagccugguggaaaacgcccugguggucgccaccaucgcuaagaauagaaaccuccacuccccgauguacuguuuuauuugcugucuggcccuuucugaucugcucgugagcggcuccaauguucuggagacagcugugauccuucugcucgaagccggggcgcuggucgcccgggcugccgugcugcagcaacucgacaacguuauugaugugauuaccugcagcucuaugcuguccagccuuuguuuccugggagcuaucgccgucgaccgcuauaucucuaucuuuuacgcgcucagauaucauuccauugugacacugccccgggcccgcagagcuguggccgcuaucugggucgccagcguuguguucucuacccuuuuuauugccuacuaugaucacguggcuguccugcucugccuggugguuuucuuucuggcgaugcucgugcugauggccguccuuuacgugcauaugcuggcucgggccugucagcacgcccagggcaucgcucgccuccauaaaagacagcggccuguucaccaaggcuucgggcugaagggagccgugacacuuaccauucugcucggcaucuuuuuccugugcugggggcccuuuuuccugcaccucacgcugaucguccuuuguccugagcauccuaccugcggauguauuuuuaaaaauuucaaccuguuccucgcgcugaucauuugcaaugcuaucauugacccccugaucuaugccuuucacucccaggaacuucgcagaacacucaaggaggugcugaccugcagcugguga

SEQ ID NO: 3327 - RNA, 954 nt, Artificial Sequence; identical to SEQ ID NO: 3326
  AHC09522 variant

SEQ ID NO: 3328 - RNA, 954 nt, Artificial Sequence
  AHC09804 variant
auggccgugcagggcagccaaagacggcugcucgggucccugaacucuacccccacagcuaucccucagcuuggacuggccgcgaaucagacgggcgcucgcugccucgaggucagcauuuccgacgggcuguuccuuucucugggacucguuagccugguggaaaacgcccugguggucgccaccaucgcuaagaauagaaaccuccacuccccgauguacuguuuuauuugcugucuggcccuuucugaucugcucgugagcggcuccaauguucuggagacagcugugauccuucugcucgaagccggggcgcuggucgcccgggcugccgugcugcagcaacucgacaacguuauugaugugauuaccugcagcucuaugcuguccagccuuuguuuccugggagcuaucgccgucgaccgcuauaucucuaucuuuuacgcgcucagauaucauuccauugugacacugccccgggcccgccaggcuguggccgcuaucugggucgccagcguuguguucucuacccuuuuuauugccuacuaugaucacguggcuguccugcucugccuggugguuuucuuucuggcgaugcucgugcugauggccguccuuuacgugcauaugcuggcuagagccugucagcacgcccagggcaucgcucggcuccauaaacgccaaagaccuguucaccagggcuucgggcugaagggagccgugacacuuaccauucugcucggcaucuuuuuccugugcugggggcccuuuuuccugcaccucacgcugaucguccuuuguccugagcauccuaccugcggauguauuuuuaaaaauuucaaccuguuccucgcgcugaucauuugcaaugcuaucauugacccccugaucuaugccuuucacucccaggaacuucggcgcacacucaaggaggugcugaccugcagcugguga

SEQ ID NO: 3329 - RNA, 954 nt, Artificial Sequence
  BAE94313 variant
auggccgugcagggcagccaaagacggcugcucgggucccugaacucuacccccacagcuaucccucagcuuggacuggccgcgaaucagacgggcgcucgcugccucgaggucagcauuuccgacgggcuguuccuuucucugggacucguuagccugguggaaaacgcccugguggucgccaccaucgcuaagaauagaaaccuccacuccccgauguacuguuuuauuugcugucuggcccuuucugaucugcucgugagcggcuccaauguucuggagacagcugugauccuucugcucgaagccggggcgcuggucgcccgggcugccgugcugcagcaacucgacaacguuaccgaugugauuacaugcagcucuaugcuguccagccuuuguuuccugggagcuaucgccgucgaccgcuauaucucuaucuuuuacgcgcucagauaucauuccauugugacccugccccgggcccgcagagcuguggccgcuauuugggucgccagcguuguguucucuacacuuuuuaucgccuacuaugaucacguggcuguccugcucugccuggugguuuucuuucuggcgaugcucgugcugauggccguccuuuacgugcauaugcuggcucgggccugucagcacgcccagggcauugcucgccuccauaaaagacagcggccuguucaccaaggcuucgggcugaagggagccgugacccuuacgauccugcucggcaucuuuuuccugugcugggggcccuuuuuccugcaccucacccugauuguccuuuguccugagcaucccacaugcggauguaucuuuaaaaauuucaaccuguuccucgcgcugauuaucugcaaugcuauuaucgacccucugauuuaugccuuucacucccaggaacuucgcagaacccucaaggaggugcugacaugcagcugguga

SEQ ID NO: 3330 - RNA, 954 nt, Artificial Sequence
  AHC09531 variant
auggccgugcagggcagccaaagacggcugcucgggucccugaacucuacccccacagcuaucccucagcuuggacuggccgcgaaucagacgggcgcucgcugccucgaggucagcauuuccgacgggcuguuccuuucucugggacucguuagccugguggaaaacgcccugguggucgccaccaucgcuaagaauagaaaccuccacuccccgauguacuguuuuauuugcugucuggcccuuucugaucugcucgugagcggcuccaauaugcuggagacagcuguuauccuucugcucgaagccggggcgcugguggcccgggcugccguccugcagcaacucgacaacgugauugauguuauuaccugcagcucuaugcuguccagccuuuguuuccugggagcuaucgccguggaccgcuauaucucuaucuuuuacgcgcucagauaucauuccauugucacacugccccgggcccgcagagcuguggccgcuaucuggguggccagcgucguuuucucuacccuuuuuauugccuacuaugaucacguggcugugcugcucugccuggucguguucuuucuggcgaugcucguucugauggccgugcuuuacguccauaugcuggcucgggccugucagcacgcccagggcaucgcucgccuccauaaaagacagcggccugugcaccaaggcuucgggcugaagggagccguuacacuuaccauucugcucggcaucuuuuuccugugcugggggcccuuuuuccugcaccucacgcugaucgugcuuuguccugagcauccuaccugcggauguauuuuuaaaaauuucaaccuguuccucgcgcugaucauuugcaaugcuaucauugacccccugaucuaugccuuucacucccaggaacuucgcagaacacucaaggagguccugaccugcagcugguga

SEQ ID NO: 3331 - RNA, 954 nt, Artificial Sequence
  BAE94311 variant
auggccgugcagggcagccaaagacggcugcucgggucccugaacucuacccccacagcuaucccucagcuuggacuggccgcgaaucagacgggcgcucgcugccucgaggucagcauuuccgacgggcuguuccuuucucugggacucguuagccugguggaaaacgcccugguggucgccaccaucgcuaagaaucagaaccuccacuccccgauguacuguuuuauuugcugucuggcccuuucugaucugcucgugagcggcuccaauguucuggagacagcugugauccuucugcucgaagccggggcgcuggucgccagagcugccgugcugcaacagcucgacaacguuauugaugugauuaccugcagcucuaugcuguccagccuuuguuuccugggagcuaucgccgucgaccgguauaucucuaucuuuuacgcgcuccgcuaucauuccauugugacacugcccagagcccggcaggcuguggccgcuaucugggucgccagcguuguguucucuacccuuuuuauugccuacuaugaucacguggcuguccugcucugccuggugguuuucuuucuggcgaugcucgugcugauggccguccuuuacgugcauaugcuggcucgcgccugucagcacgcccaaggcaucgcuagacuccauaaacggcagcgcccuguucaccagggcuucgggcugaagggagccgugacacuuaccauucugcucggcaucuuuuuccugugcugggggcccuuuuuccugcaccucacgcugaucguccuuuguccugagcauccuaccugcggauguauuuuuaaaaauuucaaccuguuccucgcgcugaucauuugcaaugcuaucauugacccccugaucuaugccuuucacucccaggaacuuagacggacacucaaggaggugcugaccugcagcugguga

SEQ ID NO: 3332 - RNA, 954 nt, Artificial Sequence
  BAE94309 variant
auggccgugcagggcagccaaagacggcugcucgggucccugaacucuacccccacagcuaucccucagcuuggacuggccgcgaaucagacgggcgcucgcugccucgaggucagcauuuccgacgggcuguuccuuucucugggacucguuagccugguggaaaacgcccugguggucgccaccaucgcuaagaauagaaaccuccacuccccgauguacuguuuuauuugcugucuggcccuuucugaucugcucgugagcggcuccaauguucuggagacagcugugauccuucugcucgaagccggggcgcuggucgcccgggcugccgugcugcagcaacucgacaacguuauugaugugauuaccugcagcucuaugcuguccagccuuuguuuccugggagcuaucgccgucgaccgcuauaucucuaucuuuuacgcgcucagauaucauuccauugugacacugccccgggcccgccaggcugugggcgccaucugggucgcuagcguuguguucucuacccuuuuuauugccuacuaugaucacguggccguccugcucugccuggugguuuucuuucuggcuaugcucgugcugauggcgguccuuuacgugcauaugcuggccagagcuugucagcacgcccagggcaucgcccggcuccauaaacgccaaagaccuguucaccagggguucggacugaagggcgcugugacacuuaccauucugcucgggaucuuuuuccugugcuggggacccuuuuuccugcaccucacgcugaucguccuuuguccugagcauccuaccugcggcuguauuuuuaaaaauuucaaccuguuccucgcccugaucauuugcaaugcgaucauugacccccugaucuaugcuuuucacucccaggaacuucggcgcacacucaaggaggugcugaccugcagcugguga

SEQ ID NO: 3333 - RNA, 954 nt, Artificial Sequence
  BAE94308 variant
auggccgugcagggcagccaaagacggcugcucgggucccugaacucuacccccacagcuaucccucagcuuggacuggccgcgaaucagacgggcgcucgcugccucgaggucagcauuuccgacgggcuguuccuuucucugggacucguuagccugguggaaaacgcccugguggucgccaccaucgcuaagaauagaaaccuccacuccccgauguacuguuuuauuugcugucuggcccuuucugaucugcucgugagcggcuccaauguucuggagacagcugugauccuucugcucgaagccggggcgcuggucgcccgggcugccgugcugcagcaacucgacaacguuaccgaugugauuacaugcagcucuaugcuguccagccuuuguuuccugggagcuaucgccgucgaccgcuauaucucuaucuuuuacgcgcucagauaucauuccauugugacccugacacgggcccgcagagcuguggccgcuauuugggucgccagcguuguguucucuacccuuuuuaucgccuacuaugaucacguggcuguccugcucugccuggugguuuucuuucuggcgaugcucgugcugauggccguccuuuacgugcauaugcuggcucgggccugucagcacgcccagggcauugcucgccuccauaaaagacagcggcccguucaccaaggcuucgggcugaagggagccgugacgcuuaccauccugcucggcaucuuuuuccugugcugggggcccuuuuuccugcaccucacacugauuguccuuuguccugagcauccuaccugcggauguaucuuuaaaaauuucaaccuguuccucgcgcugauuaucugcaaugcuauuaucgacccccugauuuaugccuuucacucccaggaacuucgcagaacacucaaggaggugcugaccugcagcugguga

SEQ ID NO: 3334 - RNA, 954 nt, Artificial Sequence
  BAE94307 variant
auggccgugcagggcagccaaagacggcugcucgggucccugaacucuacccccacagcuaucccucagcuuggacuggccgcgaaucagacgggcgcucgcugccucgaggucagcauuuccgacgggcuguuccuuucucugggacucguuagccugguggaaaacgcccugguggucgccaccaucgcuaagaauagaaaccuccacuccccgauguacuguuuuauuugcugucuggcccuuucugaucugcucgugagcggcuccaauaugcuggagacagcuguuauccuucugcucgaagccggggcgcugguggcccgggcugccguccugcagcaacucgacaacgugauugauguuauuaccugcagcucuaugcuguccagccuuuguuuccugggagcuaucgccguggaccgcuauaucucuaucuuuuacgcgcucagauaucauuccauugucauccugccccgggcccgcagagcuguggccgcuauuuggguggccagcgucguuuucucuacacuuuuuaucgccuacuaugaucacguggcugugcugcucugccuggucguguucuuucuggcgaugcucguucugauggccgugcuuuacguccauaugcuggcucgggccugucagcacgcccagggcauugcucgccuccauaaaagacagcggccugugcaccaaggcuucgggcugaagggagccguuacccuuacaauccugcucggcaucuuuuuccugugcugggggcccuuuuuccugcaccucacccugauugugcuuuguccugagcaucccacgugcggauguaucuuuaaaaauuucaaccuguuccucgcgcugauuaucugcaaugcuauuaucgacccucugaucuaugccuuucacucccaggaacuucgcagaacccucaaggagguccugacaugcagcugguga

SEQ ID NO: 3335 - RNA, 951 nt, Artificial Sequence
  BAE94306 variant
auggccgugcagggcagccaaagacggcugcucgggucccugaacucuacccccacagcuaucccucagcuuggacuggccgcgaaucagacgggcgcucgcugccucgaggucagcauuuccgacgggcuguuccuuucucugggacucguuagccugguggaaaacgcccugguggucgccaccaucgcuaagaauagaaaccuccacuccccgauguacuguuuuauuugcugucuggcccuuucugaucugcucgugagcggcuccaauguucuggagacagcugugauccuucugcucgaagccggggcgcuggucgcccgggcugccgugcugcagcaacucgacaacguuauugaugugauuaccugcagcucuaugcuguccagccuuuguuuccugggagcuaucgccgucgaccgcuauaucucuaucuacgcgcucagauaucauuccauugugacacugccccgggcccgccaggcuguggccgcuaucugggucgccagcguuguguuuucuacccuuuucauugccuacuaugaucacguggcuguccugcucugccuggugguguuuuuccuggcgaugcucguucugauggccguccuuuacgugcauaugcuggcuagagccugucagcacgcccagggcaucgcucggcuccauaaacgccaaagaccuguucaccagggcuuugggcugaagggagccgugacacuuaccauucugcucggcaucuucuuucugugcugggggcccuucuuucugcaccucacgcugaucguccuuuguccugagcauccuaccugcggauguauuuucaaaaauuuuaaccuguuccucgcgcugaucauuugcaaugcuaucauugacccccugaucuaugccuuccacucccaggaacuucggcgcacacucaaggaggugcugaccugcagcugguga

SEQ ID NO: 3336 - RNA, 954 nt, Artificial Sequence
  AAQ62977 variant
auggccgugcagggcagccaaagacggcugcucgggucccugaacucuacccccacagcuaucccucagcuuggacuggccgcgaaucagacgggcgcucgcugccucgaggucagcauuuccgacgggcuguuccuuucucugggacucguuagccugguggaaaacgcccugguggucgccaccaucgcuaagaauagaaaccuccacuccccgauguacuguuuuauuugcugucuggcccuuucugaucugcucgugagcggcuccaauguucuggagacagcugugauccuucugcucgaagccggggcgcuggucgcccgggcugccgugcugcagcaacucgacaacguuauugaugugauuaccugcagcucuaugcuguccagccuuuguuuccugggagcuaucgccgucgaccgcuauaucucuaucuuuuacgcgcucagauaucauuccauugugacacugccccgggcccgcagagcuguggccgcuaucugggucgccagcguuguguucucuacccuuuuuauugccuacuaugaucacguggcuguccugcucugccuggugguuuucuuucuggcgaugcucgugcugauggccguccuuuacgugcauaugcuggcucgggccugucagcacgcccagggcaucgcucgccuccauaaaagacagcggccuguucaccaaggcuucgggcugaagggagccgugacacuuaccauucugcucggcaucuuuuuccugugcugggggcccuuuuuccugcaccucacgcugaucauucuuuguccugagcauccuaccugcggauguaucuuuaaaaauuucaaccuguuccucgcgcugauuaucugcaaugcuauuaucgacccccugaucuaugccuuucacucccaggaacuucgcagaacacucaaggagguccugaccugcagcugguga

SEQ ID NO: 3337 - RNA, 954 nt, Artificial Sequence
  AAQ62975 variant
auggccgugcagggcagccaaagacggcugcucgggucccugaacucuacccccacagcuaucccucagcuuggacuggccgcgaaucagacgggcgcucgcugccucgaggucagcauuuccgacgggcuguuccuuucucugggacucguuagccugguggaaaacgcccugguggucgccaccaucgcuaagaauagaaaccuccacuccccgauguacuguuuuauuugcugucuggcccuuucugaucugcucgugagcggcuccaauguucuggagacagcugugauccuucugcucgaagccggggcgcuggucgcccgggcugugguucugcagcaacucgacaacgugauugaugucauuaccugcagcucuaugcuguccagccuuuguuuccugggagccaucgcuguggaccgcuauaucucuaucuuuuacgcccucagauaucauuccauugugacacugccccgggcgcgcagagccgucgcugccaucuggguugcuagcgugguguucucuacccuuuuuauugccuacuaugaucacgucgccgugcugcucugccugguuguguucuuucuggcuaugcucguccugauggcggugcuuuacguucauaugcuggcccgggcuugucagcacgcccagggcaucgcccgccuccauaaaagacagcggccugugcaccaaggcuucgggcugaagggagcugucacacuuaccauucugcucggcaucuuuuuccugugcugggggcccuuuuuccugcaccucacgcugaucgugcuuuguccugagcauccuaccugcggauguauuuuuaaaaauuucaaccuguuccucgcccugaucauuugcaaugcgaucauugacccccugaucuaugcuuuucacucccaggaacuucgcagaacacucaaggagguccugaccugcagcugguga

SEQ ID NO: 3338 - RNA, 954 nt, Artificial Sequence
  AAQ62974 variant
auggccgugcagggcagccaaagacggcugcucgggucccugaacucuacccccacagcuaucccucagcuuggacuggccgcgaaucagacgggcgcucgcugccucgaggucagcauuuccgacgggcuguuccuuucucugggacucguuagccugguggaaaacgcccugguggucgccaccaucgcuaagaauagaaaccuccacuccccgauguacuguuuuauuugcugucuggcccuuucugaucugcucgugagcggcuccaauguucuggagacagcugugauccuucugcucgaagccggggcgcuggucgcccgggcugccgugcugcagcaacucgacaacguuauugaugugauuaccugcagcucuaugcuguccagccuuuguuuccugggagcuaucgccgucgaccgcuauaucucuaucuuuuacgcgcucagauaucauuccauugugacacugccccgggcccgcagagcuguggccgcuaucugggucgccagcguuguguucucuacccuuuuuauugccuacuaugaucacguggcuguccugcucugccuggugguuuucuuucuggcgaugcucgugcugauggccguccuuuacgugcauaugcuggcucgggccugucagcacgcccagggcaucgcucgccuccauaaaagacagcggccuguucaccaaggcuucgggcugaagggagccgugacacuuaccauucugcucggcaucuuuuuccugugcugggggcccuuuuuccugcaccucacgcugaucguccuuuguccugagcauccuaccugcggauguauuuuuaaaaauuucaaccuguuccucgcgcugaucauuugcaaugcuaucauugacccccugaucuaugccuuucacucccaggaacuucgcagaacacucaaggaggugcugacccggagcugguga

SEQ ID NO: 3339 - RNA, 954 nt, Artificial Sequence
  AAQ62973 variant
auggccgugcagggcagccaaagacggcugcucgggucccugaacucuacccccacagcuaucccucagcuuggacuggccgcgaaucagacgggcgcucgcugccucgaggucagcauuuccgacgggcuguuccuuucucugggacucguuagccugguggaaaacgcccugguggucgccaccaucgcuaagaauagaaaccuccacuccccgauguacuguuuuauuugcugucuggcccuuucugaucugcucgugagcggcuccaauguucuggagacagcugugauccuucugcucgaagccggggcgcuggucgcccgggcugccgugcugcagcaacucgacaacguuauugaugugauuaccugcagcucuaugcuguccagccuuuguuuccugggagcuaucgccgucgaccgcuauaucucuaucuuuuacgcgcucagauaucauuccauugugacacugccccgggcccgcagagcuguggccgcuaucugggucgccagcguuguguucucuacccuuuuuauugccuacuaugaucacguggcuguccugcucugccuggugguuuucuuucuggcgaugcucgugcugauggccguccuuuacgugcauaugcuggcucgggccugucagcacgcccagggcaucgcucgccuccauaaaagacagcggccuguucaccaaggcuucgggcugaagggagccgugacacuuaccauucugcucggcaucuuuuuccugugcugggggcccuuuuuccugcaccucacgcugaucguccuuuguccugagcauccuaccugcggauguauuuuuaaaaauuucaaccuguuccucgcgcugaucauuugcaaugcuaucauugacccccugaucuaugccuuucacucccaggaacuucgcagaaugcucaaggaggugcugacaugcagcugguga

SEQ ID NO: 3340 - RNA, 954 nt, Artificial Sequence
  AAQ62972 variant
auggccgugcagggcagccaaagacggcugcucgggucccugaacucuacccccacagcuaucccucagcuuggacuggccgcgaaucagacgggcgcucgcugccucgaggucagcauuuccgacgggcuguuccuuucucugggacucguuagccugguggaaaacgcccugguggucgccaccaucgcuaagaauagaaaccuccacuccccgauguacuguuuuauuugcugucuggcccuuucugaucugcucgugagcggcuccaauguucuggagacagcugugauccuucugcucgaagccggggcgcuggucgcccgggcugccgugcugcagcaacucgacaacguuauugaugugauuaccugcagcucuaugcuguccagccuuuguuuccugggagcuaucgccgucgaccgcuauaucucuaucuuuuacgcgcucagauaucauuccauugugacacugccccgggcccgcagagcuguggccgcuaucugggucgccagcguuguguucucuacccuuuuuauugccuacuaugaucacguggcuguccugcucugccuggugguuuucuuucuggcgaugcucgugcugauggccguccuuuacgugcauaugcuggcuugggccugucagcacgcccagggcaucgcucggcuccauaaacgccagagaccuguucaccaaggcuucgggcugaagggagccgugacacuuaccauucugcucggcaucuuuuuccugugcugggggcccuuuuuccugcaccucacgcugaucguccuuuguccugagcauccuaccugcggauguauuuuuaaaaauuucaaccuguuccucgcgcugaucauuugcaaugcuaucauugacccccugaucuaugccuuucacucccaggaacuucggcgcacacucaaggaggugcugaccugcagcugguga

SEQ ID NO: 3341 - RNA, 954 nt, Artificial Sequence
  AAQ62971 variant
auggccgugcagggcagccaaagacggcugcucgggucccugaacucuacccccacagcuaucccucagcuuggacuggccgcgaaucagacgggcgcucgcugccucgaggucagcauuuccgacgggcuguuccuuucucugggacucguuagccugguggaaaacgcccugguggucgccaccaucgcuaagaauagaaaccuccacuccccgauguacuguuuuauuugcugucuggcccuuucugaucugcucgugagcggcuccaauguucuggagacagcugugauccuucugcucgaagccggggcgcuggucgcccgggcugccgugcugcagcaacucgacaacguuauugaugugauuaccugcagcucuaugcuguccagccuuuguuuccugggagcuaucgccgucgaccgcuauaucucuaucuuuuacgcgcucagauaucauuccauugugacacugccccaggcccggcgcgcuguggccgcuaucugggucgccagcguuguguucucuacccuuuuuauugccuacuaugaucacguggcuguccugcucugccuggugguuuucuuucuggcgaugcucgugcugauggccguccuuuacgugcauaugcuggcuagagccugucagcacgcccagggcaucgcucggcuccauaaacgccaaagaccuguucaccagggcuucgggcugaagggagccgugacacuuaccauucugcucggcaucuuuuuccugugcugggggcccuuuuuccugcaccucacgcugaucguccuuuguccugagcauccuaccugcggauguauuuuuaaaaauuucaaccuguuccucgcgcugaucauuugcaaugcuaucauugacccccugaucuaugccuuucacucccaggaacuucggcgcacacucaaggaggugcugaccugcagcugguga

SEQ ID NO: 3342 - RNA, 954 nt, Artificial Sequence
  AAQ62970 variant
auggccgugcagggcagccaaagacggcugcucgggucccugaacucuacccccacagcuaucccucagcuuggacuggccgcgaaucagacgggcgcucgcugccucgaggucagcauuuccgacgggcuguuccuuucucugggacucguuagccugguggaaaacgcccugguggucgccaccaucgcuaagaauagaaaccuccacuccccgauguacuguuuuauuugcugucuggcccuucuggaucuccuggugucuggcagcaauguucuugagacagcugugauccugcuccuggaagccggggcgcuggucgcccgggcugccgugcuccagcaacuggacaacguuauugaugugauuaccugcuccagcaugcuuucuucccuguguuuccucggagcuaucgccgucgaccgcuauaucagcaucuuuuacgcgcugagauaucauucuauugugacacuuccccgggcccgcagagcuguggccgcuaucugggucgccuccguuguguucagcacccuguuuauugccuacuaugaucacguggcuguccuccugugccuggugguuuucuuucucgcgaugcuggugcuuauggccguccuguacgugcauaugcucgcucgggccugucagcacgcccagggcaucgcucgccugcauaaaagacagcggccuguucaccaaggcuucgggcuuaagggagccgugacacugaccauucuccugggcaucuuuuuccugugcugggggcccuuuuuccuccaccugacgcuuaucguccuguguccugagcauccuaccugcggauguauuuuuaaaaauuucaaccucuuccuggcgcugaucauuugcaaugcuaucauugacccccuuaucuaugccuuucacucucaggaacuccgcagaacacugaaggaggugcugaccugcuccugguga

SEQ ID NO: 3343 - RNA, 954 nt, Artificial Sequence
  AAQ62969 variant
auggccgugcagggcagccaaagacggcugcucgggucccugaacucuacccccacagcuaucccucagcuuggacuggccgcgaaucagacgggcgcucgcugccucgaggucagcauuuccgacgggcugcuucugucucucggacugguuagccugguggaaaacgcccucguggucgccaccaucgcuaagaauagaaaccugcacuccccgauguacuguuucauuugcugucuugcccugucugaucuccuggugagcggcuccaauguucuugagacagcugugauccugcuccuggaagccggggcgcuggucgcccgggcugccgugcuccagcaacuggacaacguuauugaugugauuaccugcagcucuaugcuuuccagccuguguuuucucggagcuaucgccgucgaccgcuauaucucuaucuucuacgcgcugagauaucauuccauugugacacuuccccgggcccgcagagcuguggccgcuaucugggucgccagcguuguguuuucuacccuguucauugccuacuaugaucacguggcuguccuccugugccuggugguguuuuuccucgcgaugcugguucuuauggccguccuguacgugcauaugcucgcucgggccugucagcacgcccagggcaucgcucgccugcauaaaagacagcggccuguucaccaaggcuuugggcuuaagggagccgugacacugaccauucuccugggcaucuucuuucugugcugggggcccuucuuucuccaccugacgcuuaucguccuguguccugagcauccuaccugcggauguauuuucaaaaauuuuaaccucuuccuggcgcugaucauuugcaaugcuaucauugacccccuuaucuaugccuuccacucccaggaacuccgcagaacacugaaggaggugcugaccugcagcugguga

SEQ ID NO: 3344 - RNA, 954 nt, Artificial Sequence
  AAO21073 variant
auggccgugcagggcagccaaagacggcuccucgggucccugaacucuacccccacagcuaucccucagcuuggacuggccgcgaaucagacgggcgcucgcugccucgaggucagcauuuccgacgggcuguuccuuucucugggacucguuagccugguggaaaacgcccugguggucgccaccaucgcuaagaauagaaaccuccacuccccgauguacuguuuuauuugcugucuggcccuuucugaucugcucgugagcggcuccaauguucgggagacagcugugauccugcuucuggaagccggggcgcucgucgcccgcgcugccgugcugcagcaacuggacaacguuauugaugugauuaccugcagcucuaugcucuccagccuguguuuccuuggagcuaucgccgucgacagauauaucucuaucuuuuacgcgcugcgguaucauuccauugugacacucccccgcgccagacgggcuguggccgcuaucugggucgccagcguuguguucucuacccuguuuauugccuacuaugaucacguggcuguccuucugugccucgugguuuucuuucuggcgaugcuggugcucauggccguccuguacgugcauaugcuugcucgcgccugucagcacgcccagggcaucgcuagacugcauaaacggcagcgcccuguucaccaaggcuucgggcucaagggagccgugacacugaccauucuucugggcaucuuuuuccucugcugggggcccuuuuuccugcaccugacgcucaucguccuguguccugagcauccuaccugcggauguauuuuuaaaaauuucaaccuuuuccuggcgcucaucauuugcaaugcuaucauugacccccugaucuaugccuuucacucccaggaacugagacggacacuuaaggaggugcugaccugcagcugguga

SEQ ID NO: 3345 - RNA, 954 nt, Artificial Sequence
  AHC09567 variant
auggccgugcagggcagccaaagacggcugcucgggucccugaacucuacccccacagcuaucccucagcuuggacuggccgcgaaucagacgggcgcucgcugccucgaggucagcauuuccgacgggcuguuccuuucucugggacucguuagccugguggaaaacgcccugguggucgccaccaucgcuaagaauagaaaccuccacuccccgauguacuguuuuauuugcugucuggcccuucccgaucugcucgugucuggcagcaauguucuggagacagcugugauccuucugcucgaagccggggcgcuggucgcccgggcugccgugcugcagcaacucgacaacguuauugaugugauuaccugcuccagcaugcugucuucccuuuguuuccugggagcuaucgccgucgaccgcuauaucagcaucuuuuacgcgcucagauaucauucuauugugacacugccucgggcccgcagagcuguggccgcuaucugggucgccuccguuguguucagcacccuuuuuauugccuacuaugaucacguggcuguccugcucugccuggugguuuucuuucuggcgaugcucgugcugauggccguccuuuacgugcauaugcuggcucgggccugucagcacgcccagggcaucgcucgccuccauaaaagacagcggcccguucaccaaggcuucgggcugaagggagccgugacacuuaccauucugcucggcaucuuuuuccugugcugggggcccuuuuuccugcaccucacgcugaucguccuuuguccugagcauccuaccugcggauguauuuuuaaaaauuucaaccuguuccucgcgcugaucauuugcaaugcuaucauugacccgcugaucuaugccuuucacucucaggaacuucgcagaacacucaaggaggugcugaccugcuccugguga

SEQ ID NO: 3346 - RNA, 954 nt, Artificial Sequence
  AHC09812 variant
auggccgugcagggcagccaaagacggcugcucgggucccugaacucuacccccacagcuaucccucagcuuggacuggccgcgaaucagacgggcgcucgcugccucgaggucagcauuuccgacgggcuguuccuuucucugggacucguuagccugguggaaaacgcccugguggucgccaccaucgcuaagaauagaaaccuccacuccccgauguacuguuuuauuugcugucuggcccuuucugaucugcucgugagcggcuccaauguucuggagacagcugugauccuucugcucgaagccggggcgcuggucgcccgggcugccgugcugcagcaacucgacaacguuauugaugugauuaccugcagcucuaugcuguccagccuuuguuuccugggagcuaucgccgucgaccgcuauaucucuaucuuuuacgcgcucagauaucauuccauugugacacugccccgggcccgcagagcuguggccgcuaucugggucgccagcguuguguucucuacccuuuuuauugccuacuaugaucacguggcuguccugcucugccugaugguguucuuucuggcgaugcucguucugauggccgugcuuuacguccauaugcuggcucgggccugucagcacgcccagggcaucgcucgccuccauaaaagacagcggccugugcaccaaggcuucgggcugaagggagccguuacacuuaccauucugcucggcaucuuuuuccugugcugggggcccuuuuuccugcaccucacgcugaucgugcuuuguccugagcauccuaccugcggauguauuuuuaaaaauuucaaccuguuccucgcgcugaucauuugcaaugcuaucauugacccccugaucuaugccuuucacucccaggaacuucgcagaacacucaaggagguccugaccugcagcugguga

SEQ ID NO: 3347 - RNA, 954 nt, Artificial Sequence
  AHC10192 variant
auggccgugcagggcagccaaagacggcugcucgggucccugaacucuacccccacagcuaucccucagcuuggacuggccgcgaaucagacgggcgcucgcugccucgaggucagcauuuccgacgggcuguuccuuucucugggacucguuagccugguggaaaacgcccugguggucgccaccaucgcuaagaauagaaaccuccacuccccgauguacuguuuuauuugcugucuggcccuuucugaucugcucgugagcggcuccaauguucuggagacagcugugauccuucugcucgaagccggggcgcuggucgcccgggcugccgugcugcagcaacucgacaacguuauugaugugauuaccugcagcucuaugcuguccagccuuuguuuccugggagcuaucgccgucgaccgcuauauuucuaucuuuuacgcgcucagauaucauuccauugugacacugccccgggcccgcagagcuguggccgcuaucugggucgccagcguuguguucucuacccuuuuuauugccuacuaugaucacguggcuguccugcucugccuggugguuuucuuucuggcgaugcucgugcugauggccguccuuuacgugcauaugcuggcucgggccugucagcacgcccagggcacagcucgccuccauaaaagacagcggccuguucaccaaggcuucgggcugaagggagccgugacccuuacgauccugcucggcaucuuuuuccugugcugggggcccuuuuuccugcaccucacccugaucguccuuuguccugagcaucccacaugcggauguaucuuuaaaaauuucaaccuguuccucgcgcugauuaucugcaaugcuauuaucgacccucugauuuaugccuuucacucccaggaacuucgcagaacccucaaggaggugcugacaugcagcugguga

SEQ ID NO: 3348 - RNA, 954 nt, Artificial Sequence
  AHC09641 variant
auggccgugcagggcagccaaagacggcugcucgggucccugaacucuacccccacagcuaucccucagcuuggacuggccgcgaaucagacgggcgcucgcugccucgaggucagcauuuccgacgggcuguuccuuucucugggacucguuagccugguggaaaacgcccugguggucgccaccaucgcuaagaauagaaaccuccacuccccgauguacuguuuuauuugcugucuggcccuuucugaucugcucgugagcggcuccaauguucuggagacagcugugauccuucugcucgaagccggggcgcuggucgcccgggcugccgugcugcagcaacucgacaacguuauugaugugauuaccugcagcucuaugcuguccagccuuuguuuccugggagcuaucgccgucgaccgcuauauuucuaucuuuuacgcgcucagauaucauuccacagugacccugccccgggcccgcagagcuguggccgcuauuugggucgccagcguuguguucucuacacuuuuuaucgccuacuaugaucacguggcuguccugcucugccuggugguuuucuuucuggcgaugcucgugcugauggccguccuuuacgugcauaugcuggcucgggccugucagcacgcccagggcauugcucgccuccauaaaagacagcggccuguucaccaaggcuucgggcugaagggagccgugacccuuacgauccugcucggcaucuuuuuccugugcugggggcccuuuuuccugcaccucacccugaucguccuuuguccugagcaucccacaugcggauguaucuuuaaaaauuucaaccuguuccucgcgcugauuaucugcaaugcuauuaucgacccucugauuuaugccuuucacucccaggaacuucgcagaacccucaaggaggugcugacaugcagcugguga

SEQ ID NO: 3349 - RNA, 954 nt, Artificial Sequence
  AHC10044 variant
auggccgugcagggcagccaaagacggcugcucgggucccugaacucuacccccacagcuaucccucagcuuggacuggccgcgaaucagacgggcgcucgcuaccucgaggucagcauuuccgacgggcuguuccuuucucugggacucguuagccugguggaaaacgcccugguggucgccaccaucgcuaagaauagaaaccuccacuccccgauguauugcuuuauuuguugccuggcccuuucugaucugcucgugagcggcuccaauguucuggagacagcugugauccuucugcucgaagccggggcgcuggucgcccgggcugccgugcugcagcaacucgacaacguuauugaugugaucaccuguagcucuaugcuguccagccuuugcuuccugggagcuaucgccgucgaccgcuacauuucuaucuuuuaugcgcucagauaccauuccauugugacacugccccgggcccgcagagcuguggccgcuaucugggucgccagcguuguguucucuacccuuuuuauugccuauuacgaucacguggcuguccugcucugucuggugguuuucuuucuggcgaugcucgugcugauggccguccuuuaugugcauaugcuggcucgggccugccagcacgcccagggcaucgcucgccuccauaaaagacagcggccuguucaccaaggcuucgggcugaagggagccgugacacuuaccauucugcucggcaucuuuuuccuguguugggggcccuuuuuccugcaccucacgcugaucguccuuugcccugagcaucccaccuguggaugcauuuuuaaaaauuucaaccuguuccucgcgcugaucauuuguaaugcuaucauugacccucugaucuacgccuuucacucccaggaacuucgcagaacacucaaggaggugcugaccugcagcugguga

SEQ ID NO: 3350 - RNA, 954 nt, Artificial Sequence
  AHC09532 variant
auggccgugcagggcagccaaagacggcugcucgggucccugaacucuacccccacagcuaucccucagcuuggacuggccgcgaaucagacgggcgcucgcugccucgaggucagcauuuccgacgggcuguuccuuucucugggacucguuagccugguggaaaacgcccuggugcucgccaccaucgcuaagaauagaaaccugcacuccccgauguacuguuuuauuugcugucuugcccugucugaucuccuggucagcggcuccaaugugcuugagacagcuguuauccugcuccuggaagccggggcgcugguggcccgggcugccguccuccagcaacuggacaacgugauugauguuauuaccugcagcucuaugcuuuccagccuguguuuccucggagcuaucgccguggaccgcuauaucucuaucuuuuacgcgcugagauaucauuccauugucacacuuccccgggcccgcagagcuguggccgcuaucuggguggccagcgucguuuucucuacccuguuuauugccuacuaugaucacguggcugugcuccugugccuggucguguucuuucucgcgaugcugguucuuauggccgugcuguacguccauaugcucgcucgggccugucagcacgcccagggcaucgcucgccugcauaaaagacagcggccugugcaccaaggcuucgggcuuaagggagccguuacacugaccauucuccugggcaucuuuuuccugugcugggggcccuuuuuccuccaccugacgcuuaucgugcuguguccugagcauccuaccugcggauguauuuuuaaaaauuucaaccucuuccuggcgcugaucauuugcaaugcuaucauugacccccuuaucuaugccuuucacucccaggaacuccgcagaacacugaaggagguccugaccugcagcugguga

SEQ ID NO: 3351 - RNA, 954 nt, Artificial Sequence
  AHC11042 variant
auggccgugcagggcagccaaagacggcugcucgggucccugaacucuacccccacagcuaucccucagcuuggacuggccgcgaaucagacgggcgcucgcugccucgaggucagcauuuccgacgggcuguuccuuucucugggacucguuagccugguggaaaacgcccugguggucgccaccaucgcuaagaauagaaaccuccacuccccgauguacuguuuuauuugcugucugccccuuucugaucugcucgugagcggcuccaauguucuggagacagccgugauccuucugcucgaagcuggggcccuggucgcgcgggccgcugugcugcagcaacucgacaacguuauugaugugauuaccugcagcucuaugcuguccagccuuuguuuccugggagccaucgcugucgaccgcuauaucucuaucuuuuacgcccucagauaucauuccauugugacacugccucgggcgcgcagagccguggcugccaucugggucgcuagcguuguguucucuacccuuuuuauugccuacuaugaucacguggccguccugcucugccuggugguuuucuuucuggcuaugcucgugcugauggcgguccuuuacgugcauaugcuggcccgggcuugucagcacgcccagggcaucgcccgccuccauaaaagacagcggcccguucaccaaggcuucgggcugaagggagcugugacacuuaccauucugcucggcaucuuuuuccugugcugggggcccuuuuuccugcaccucacgcugaucguccuuuguccugagcauccuaccugcggauguauuuuuaaaaauuucaaccuguuccucgcccugaucauuugcaaugcgaucauugacccgcugaucuaugcuuuucacucccaggaacuucgcagaacacucaaggaggugcugaccugcagcugguga

SEQ ID NO: 3352 - RNA, 954 nt, Artificial Sequence
  AHC10733 variant
auggccgugcagggcagccaaagacggcugcucgggucccugaacucuacccccacagcuaucccucagcuuggacuggccgcgaaucagacgggcgcucgcugccucgaggucagcauuuccgacgggcuguuccuuucucugggacucguuagccugguggaaaacgcccugguggucgccaccaucgcuaagaauagaaaccuccacuccccgauguacuguuuuauuugcugucuggcccuuucugaucugcucgugagcggcuccaauguucuggagacagcugugauccuucugcucgaagccggggcgcuggucgcccgggcugccgugcugcagcaacucgacaacguuauugaugugauuaccugcagcucuaugcuguccagccuuuguuuccugggagcuaucgccgucgaccgcuauaucucuaucuuuuacgcgcucagauaucauuccauugugacacugccccgggcccgcagagcuguggccgcuaucugggucgccagcguuguguucucuacccuuuuuauugccuacuaugaucacguggcuguccugcucugccuggugguuuucuuucuggcgaugcucgugcugauggccguccuuuacgugcauaugcuggcucgggccugucagcacgcccagggcaucgcucgccuccauaaaagacagcggccuguucaccaaggcuucgggcugaagggagccgugacacuuaccauucugcucggcaucuuuuuccugugcugggggcccuuuuuccugcaccucacgcugaucguccuuuguccugagcauccuaccugcggauguauuuuuaaaaauuucucccuguuccucgcgcugaucauuugcaacgcuaucauugacccccugaucuaugccuuucacagccaggaacuucgcagaacacucaaggaggugcugaccugcuccugguga

SEQ ID NO: 3353 - RNA, 954 nt, Artificial Sequence
  AHC10696 variant
auggccgugcagggcagccaaagacggcugcucgggucccugaacucuacccccacagcuaucccucagcuuggacuggccgcgaaucagacgggcgcucgcugccucgaggucagcauuuccgacgggcuguuccuuucucugggacucguuagccugguggaaaacgcccugguggucgccaccaucgcuaagaauagaaaccuccacuccccgauguacuguuuuauuugcugucuggcccuuucugaucugcucgugagcggcuccaauguucuggagacagcugugauccuucugcucgaagccggggcgcuggucgcccgggcugccgugcugcagcaacucgacaacguuauugaugugauuaccugcagcucuaugcuguccagccuuuguuuccugggagcuaucgccgucgaccgcuauaucucuaucuuuuacgcgcucagauaucauuccauugugacacugccccgggcccgcagagcuguggccgcuaucugggucgccagcguuguguucucuacccuuuuuauugccuacuaugaucacguggcuguccugcucugccuggugguuuucuuucuggcgaugcucgugcugauggccguccuuuacgugcauaugcuggcucgggccugucagcacgcccagggcaucgcucgccuccauaaaagacagcggccuguucaccaaggcuucgggcugaagggagccgugacacuuaccauucugcucggcaucuuuuuccugugcugggggcccuuuuuccugcaccucacgcugaucguccuuuguccugagcauccuaccugcggauguauuuuuaaaaauuucaaccuguuccucgcgcugaucauuugcaaugcuaucauugacccccugauccacgccuuucauucccaggaacuucgcagaacacucaaggaggugcugaccugcagcugguga

SEQ ID NO: 3354 - RNA, 954 nt, Artificial Sequence
  AHC09527 variant
auggccgugcagggcagccaaagacggcugcucgggucccugaacucuacccccacagcuaucccucagcuuggacuggccgcgaaucagacgggcgcucgcugccucgaggucagcauuuccgacgggcuguuccuuucucugggacucguuagccugguggaaaacgcccugguggucgccaccaucgcuaagaauagaaaccuccacuccccgauguacuguuuuauuugcugucuggcccuuucugaucugcucgugagcggcuccaauguucuggagacagcugugauccuucugcucgaagccggggcgcuggucgcccgggcugccgugcugcagcaacucgacaacguuauugaugugauuaccugcagcucuaugcuguccagccuuuguuuccugggagcuaucgccgucgaccgcuauaucucuaucuuuuacgcgcucagauaucauuccauugugacacugccccgggcccgcagagcuguggccgcuaucugggucgccagcguuguguucucuacccuuuuuauugccuacuaugaucacguggcuguccugcucugccuggugguuuucuuucuggcgaugcucgugcugauggccguccuuuacgugcauaugcuggcucgggccugucagcacgcccagggcaucgcucgccuccauaaaagacagcggccuguucaccaaggcuucgggcugaagggagccgugacacuuaccauucugcucggcaucuuuuuccugugcugggggcccuuuuuccugcaccucacgcugaucguccuuuguccugagcauccuaccugcggauguauuuuuaaaaauuucaaccuguuccucgcgcugaucauuugcaaugcuaucauucacccccugaucuaugccuuucauucccaggaacuucgcagaacacucaaggaggugcugaccugcagcugguga

SEQ ID NO: 3355 - RNA, 954 nt, Artificial Sequence
  AHC10869 variant
auggccgugcagggcagccaaagacggcugcucgggucccugaacucuacccccacagcuaucccucagcuuggacuggccgcgaaucagacgggcgcucgcugccucgaggucagcauuuccgacgggcuguuccuuucucugggacucguuagccugguggaaaacgcccugguggucgccaccaucgcuaagaauagaaaccuccacuccccgauguacuguuuuauuugcugucuggcccuuucugaucugcucgugagcggcuccaauguucuggagacagcugugauccuucugcucgaagccggggcgcuggucgcccgggcugccgugcugcagcaacucgacaacguuauugaugugauuaccugcagcucuaugcuguccagccuuuguuuccugggagcuaucgccgucgaccgcuauaucucuaucuuuuacgcgcucagauaucauuccauugugacacugccccgggcccgcagagcuguggccgcuaucugggucgccagcguuguguucucuacccuuuuuauugccuacuaugaucacguggcuguccugcucugccuggugguuuucuuucuggcgaugcucgugcugauggccguccuuuacgugcauaugcuggcucgggccugucagcacgcccagggcaucgcucgccuccauaaaagacagcacccuguucaccaaggcuucgggcugaagggagccgugacacuuaccauucugcucggcaucuuuuuccugugcugggggcccuuuuuccugcaucucacgcugaucguccuuuguccugagcacccuaccugcggauguauuuuuaaaaauuucaaccuguuccucgcgcugaucauuugcaaugcuaucauugacccccugaucuaugccuuucauucccaggaacuucggcgcacacucaaggaggugcugaccugcagcugguga

SEQ ID NO: 3356 - RNA, 954 nt, Artificial Sequence
  AHC11615 variant
auggccgugcagggcagccaaagacggcugcucgggucccugaacucuacccccacagcuaucccucagcuuggacuggccgcgaaucagacgggcgcucgcugccucgaggucagcauuuccgacgggcuguuccuuucucugggacucguuagccugguggaaaacgcccugguggucgccaccaucgcuaagaauagaaaccuccacuccccgauguacuguuuuauuugcugucuggcccuuucugaucugcucgugagcggcuccaauguucuggagacagcugugauccuucugcucgaagccggggcgcuggucgcccgggcugccgugcugcagcaacucgacaacguuauugaugugauuaccugcagcucuaugcuguccagccuuuguuuccugggagcuaucgccgucgaccgcuauaucucuaucuuuuacgcgcucagauaucauuccauugugacacugccccgggcccgcagagcuguggccgcuaucugggucgccagcguuguguucucuacccuuuuuauugccuacuaugaucacguggcuguccugcucugccuggugguuuucuuucuggcgaugcucgugcugauggccguccuuuacgugcauaugcuggcucgggccugucagcacgcccagggcaucgcucgccuccauaaaagacagcggccuguucaccaaggcuucgggcugaagggagccgugacacuuaccauucugcucggcaucuuuuuccugugcugggggcccuuuuuccugcaccucacgcugaucguccuuuguccugagcauccuaccugcggauguauuuuuaaaaauuucaaccuguuccucacacugaucauuugcaaugcgaucauugacccccugaucuaugcuuuucacucccaggaacuucgcagaacccucaaggaggugcugacaugcagcugguga

SEQ ID NO: 3357 - RNA, 954 nt, Artificial Sequence
  AHC09535 variant
auggccgugcagggcagccaaagacggcugcucgggucccugaacucuacccccacagcuaucccucagcuuggacuggccgcgaaucagacgggcgcucgcugccucgaggucagcauuuccgacgggcuguuccuuucucugggacucguuagccugguggaaaacgcccugguggucgccaccaucgcuaagaauagaaaccuccacuccccgauguacuguuuuauuugcugucuggcccuuucugaucugcucgugagcggcuccaauguucuggagacagcugugauccuucugcucgaagccggggcgcuggucgcccgggcugccgugcugcagcaacucgacaacguuauugaugugauuaccugcagcucuaugcuguccagccuuuguuuccugggagcuaucgccgucgaccauuauaucucuaucuuuuacgcgcuccgcuaucacuccauugugacacugcccagagcccggcgcgcuguggccgcuaucugggucgccagcguuguguucucuacccuuuuuauugccuacuaugaucauguggcuguccugcucugccuggugguuuucuuucuggcgaugcucgugcugauggccguccuuuacgugcacaugcuggcuagagccugucagcaugcccagggcaucgcucggcuccacaaacgccagagaccuguucaccaaggcuucgggcugaagggagccgugacacuuaccauucugcucggcaucuuuuuccugugcugggggcccuuuuuccugcaucucacgcugaucguccuuuguccugagcacccuaccugcggauguauuuuuaaaaauuucaaccuguuccucgcgcugaucauuugcaaugcuaucauugacccccugaucuaugccuuucauucccaggaacuucggcgcacacucaaggaggugcugaccugcagcugguga

SEQ ID NO: 3358 - RNA, 954 nt, Artificial Sequence
  AHC11840 variant
auggccgugcagggcagccaaagacggcugcucgggucccugaacucuacccccacagcuaucccucagcuuggacuggccgcgaaucagacgggcgcucgcugccucgaggucagcauuuccgacgggcuguuccuuucucugggacucguuagccugguggaaaacgcccugguggucgccaccaucgcuaagaauagaaaccuccacuccccgauguacuguuuuauuugcugucuggcccuuucugaucugcucgugagcggcuccaauguucuggagacagcugugauccuucugcucgaagccggggcgcuggucgcccgggcugccgugcugcagcaacucgacaacguuauugaugugauuaccugcagcucuaugcuguccagccuuuguuuccugggagcuaucgccgucgaccgcuauaucucuaucuuuuacgcgcucagauaucauuccauugugacacugccccgggcccgcagagcuguggccgcuaucugggucgccagcguuguguucucuacccuuuuuauugccuacuaugaucacguggcuguccugcucugccuggugguuuucuuucuggcgaugcucgugcugauggccguccuuuacgugcauaugcuggcucgggccugucagcacgcccagggcaucgcucgccuccauaaaagacagcggccuguucaccaaggcuucgggcugaagggagccgugacacuuaccauucugcucggcaucuuuuuccugugcugggggcccuuuuuccugcaccucacgcugaucguccuuuguccugagcauccuaccugcggauguauuuuuaaaaauuucaaccuguuccucgcgcugaucauuugcaaugcuaucauugacccccugaucuaugccuuucacaaccaggaacuucgcagaacacucaaggaggugcugaccugcuccugguga

SEQ ID NO: 3359 - RNA, 954 nt, Artificial Sequence
  AHC09665 variant
auggccgugcagggcagccaaagacggcugcucgggucccugaacucuacccccacagcuaucccucagcuuggacuggccgcgaaucagacgggcgcucgcugccucgaggucagcauuuccgacgggcuguuccuuucucugggacucguuagccugguggaaaacgcccugguggucgccaccaucgcuaagaauagaaaccuccacuccccgauguacuguuuuauuugcugucuggcccuuucugaucugcucgugagcggcuccaauguucuggagacagcugugauccuucugcucgaagccggggcgcuggucgcccgggcugccgugcugcagcaacucgacaacguuauugauaugauuaccugcagcucuaugcuguccagccuuuguuuccugggagcuaucgccguggaccgcuauaucucuaucuuuuacgcgcucagauaucauuccauugucacacugccccgggcccgcagagcuguggccgcuaucuggguggccagcgucguuuucucuacccuuuuuauugccuacuaugaucacguggcugugcugcucugccuggucguguucuuucuggcgaugcucguucugauggccgugcuuuacguccauaugcuggcucgggccugucagcacgcccagggcaucgcucgccuccauaaaagacagcggccugugcaccaaggcuucgggcugaagggagccguuacacuuaccauucugcucggcaucuuuuuccugugcugggggcccuuuuuccugcaccucacgcugaucgugcuuuguccugagcauccuaccugcggauguauuuuuaaaaauuucaaccuguuccucgcgcugaucauuugcaaugcuaucauugacccccugaucuaugccuuucacucccaggaacuucgcagaacacucaaggagguccugaccugcagcugguga

SEQ ID NO: 3360 - RNA, 954 nt, Artificial Sequence
  AHC11324 variant
auggccgugcagggcagccaaagacggcugcucgggucccugaacucuacccccacagcuaucccucagcuuggacuggccgcgaaucagacgggcgcucgcugccucgaggucagcauuuccgacgggcuguuccuuucucugggacucguuagccugguggaaaacgcccugguggucgccaccaucgcuaagaauagaaaccuccacuccccgauguacuguuuuauuugcugucuggcccuuucugaucugcucgugagcggcuccaauguucuggagacagcugugauccuucugcucgaagccggggcgcuggucgcccgggcugccgugcugcagcaacucgacaacguuauugaugugauuaccugcagcucuaugcuguccagccuuuguuuccugggagcuaucgccgucgaccgcuauaucucuaucuuuuacgcgcucagauaucauuccauugugacacugccccgggcccgcagagcuguggccgcuaucugggucgccagcguuguguucucuacccuuuuuauugccuacuaugaucacguggcuguccugcucugccuggugguuuucuuucuggcgaugcucgugcugauggccguccuuuacgugcauaugcuggcucgggccugucagcacgcccagggcaucgcucgccuccauaaaagacagcggccuguucaccaaggcuucgggcugaagggagccgugacacuuaccauucugcucggcaucuuuuuccugugcugggggcccuuuuuccugcaccucacgcugaucguccuuuguccugagcauccuaccugcggauguauuuuuaaaaauuucaaccuguuccucgcgcugaucauucgcaaugcuaucauugacccccugaucuaugccuuucacucccaggaacuuagacggacacucaaggaggugcugaccugcagcugguga

SEQ ID NO: 3361 - RNA, 954 nt, Artificial Sequence
  AHC09521 variant
auggccgugcagggcagccaaagacggcugcucgggucccugaacucuacccccacagcuaucccucagcuuggacuggccgcgaaucagacgggcgcucgcugccucgaggucagcauuuccgacgggcuguuccuuucucugggacucguuagccugguggaaaacgcccugguggucgccaccaucgcuaagaauagaaaccuccacuccccgauguacuguuuuauuugcugucuggcccuuucugaucugcucgugagcggcuccaauguucuggagacagcugugauccuucugcucgaagccggggcgcuggucgcccgggcugccgugcugcagcaacucgacaacguuauugaugugauuaccugcagcucuaugcuguccagccuuuguuuccugggagcuaucgccgucgaccgcuauaucucuaucuuuuacgcgcucagauaucauuccauugugacacugcccugggcccggcgcgcuguggccgcuaucugggucgccagcguuguguucucuacccuuuuuauugccuacuaugaucacguggcuguccugcucugccuggugguuuucuuucuggcgaugcucgugcugauggccguccuuuacgugcauaugcuggcuagagccugucagcacgcccagggcaucgcucggcuccauaaacgccagagaccuguucaccaaggcuucgggcugaagggagccgugacacuuaccauucugcucggcaucuuuuuccugugcugggggcccuuuuuccugcaccucacgcugaucguccuuuguccugagcauccuaccugcggauguauuuuuaaaaauuucaaccuguuccucgcgcugaucauuugcaaugcuaucauugacccccugaucuaugccuuucacucccaggaacuucggcgcacacucaaggaggugcugaccugcagcugguga

SEQ ID NO: 3362 - RNA, 954 nt, Artificial Sequence
  AHC11794 variant
auggccgugcagggcagccaaagacggcugcucgggucccugaacucuacccccacagcuaucccucagcuuggacuggccgcgaaucagacgggcgcucgcugccucgaggucagcauuuccgacgggcuguuccuuucucugggacucguuagccugguggaaaacgcccugguggucgccaccaucgcuaagaauagaaaccuccacuccccgauguacuguuuuauuugcugucuggcccuuucugaucugcucgugagcggcuccaauguucuggagacagcugugauccuucugcucgaagccggggcgcuggucgcccgggcugccgugcugcagcaacucgacaacguuauugaugugauuaccugcagcucuaugcuguccagccuuuguuuccugggagcuaucgccgucgaccgcuauaucucuaucuuuuacgcgcucagauaucauuccauugugacacugccccgggcccgcagagcuguggccgcuaucugggucgccagcguuguguucucuacccuuuuuauugccuacuaugaucacguggcuguccugcucugccuggugguuuucuuucuggcgaugcucgugcugauggccguccuuuacgugcauaugcuggcucgggccugucagcacgcccagggcaucgcucgccuccauaaaagacagcggccuguucaccaaggcuucgggcugaagggagccgugacacuuaccauucugcucggcaucuuuuuccugugcugggggcccuuuuuccugcaccucacgcugaucguccuuuguccugagcaucccgaaugcggauguauuuuuaaaaauuucaaccuguuccucgcgcugaucauuugcaaugcuaucauugacccucugaucuaugccuuucacucccaggagcuucgcagaacccucaaggaggugcugacaugcagcugguga

SEQ ID NO: 3363 - RNA, 954 nt, Artificial Sequence
  AHC10874 variant
auggccgugcagggcagccaaagacggcugcucgggucccugaacucuacccccacagcuaucccucagcuuggacuggccgcgaaucagacgggcgcucgcugccucgaggucagcauuuccgacgggcuguuccuuucucugggacucguuagccugguggaaaacgcccugguggucgccaccaucgcuaagaauagaaaccuccacuccccgauguacuguuuuauuugcugucuggcccuuucugagcugcucgugagcggcuccaauguucuggaaacagcugugauccuucugcucgaggccggggcgcuggucgcccgggcugccgugcugcagcaacucgauaacguuauugacgugauuaccugcagcucuaugcuguccagccuuuguuuccugggagcuaucgccgucgaucgcuauaucucuaucuuuuacgcgcucagauaucauuccauugugacacugccccgggcccgcagagcuguggccgcuaucugggucgccagcguuguguucucuacccuuuuuauugccuacuaugaccacguggcuguccugcucugccuggugguuuucuuucuggcgaugcucgugcugauggccguccuuuacgugcauaugcuggcucgggccugucagcacgcccagggcaucgcucgccuccauaaaagacagcggccuguucaccaaggcuucgggcugaagggagccgugacacuuaccauucugcucggcaucuuuuuccugugcugggggcccuuuuuccugcaccucacgcugaucguccuuuguccugaacauccuaccugcggauguauuuuuaaaaauuucaaccuguuccucgcgcugaucauuugcaaugcuaucauugauccccugaucuaugccuuucacucccaggagcuucgcagaacacucaaggaggugcugaccugcagcugguga

SEQ ID NO: 3364 - RNA, 954 nt, Artificial Sequence
  AHC09597 variant
auggccgugcagggcagccaaagacggcugcucgggucccugaacucuacccccacagcuaucccucagcuuggacuggccgcgaaucagacgggcgcucgcugccucgaggucagcauuuccgacgggcuguuccuuucucugggacucguuagccugguggaaaacgcccugguggucgccaccaucgcuaagaauagaaaccuccacuccccgauguacuguuuuauuugcugucuggcccuuucugaucugcucgugagcggcuccaauguucuggagacagcugugauccuucugcucgaagccggggcgcuggucgcccgggcugccgugcugcagcaacucgacaacguuauugaugugauuaccugcagcucuaugcuguccagccuuuguuuccugggagcuaucgccgucgaccgcuauaucucuaucuuuuacgcgcucugcuaucauuccauugugacacugcccagagcccggcgcgcuguggccgcuaucugggucgccagcguuguguucucuacccuuuuuauugccuacuaugaucacguggcuguccugcucugucuggugguuuucuuucuggcgaugcucgugcugauggccguccuuuacgugcauaugcuggcuagagccugccagcacgcccagggcaucgcucggcuccauaaacgccagagaccuguucaccaaggcuucgggcugaagggagccgugacacuuaccauucugcucggcaucuuuuuccuguguugggggcccuuuuuccugcaccucacgcugaucguccuuugcccugagcaucccaccuguggaugcauuuuuaaaaauuucaaccuguuccucgcgcugaucauuugcaaugcuaucauugacccucugaucuaugccuuucacucccaggaacuucggcgcacacucaaggaggugcugaccuguagcugguga

SEQ ID NO: 3365 - RNA, 1665 nt, Artificial Sequence
  CCDS816.1 variant
augaccgcccccggcgcugccgggagaugcccuccgacaacguggcugggaagccuccugcuucuggugugucuccuggcgucccggucuaucaccgaggaagucagcgaguacugcucccacaugauuggcucugggcaucuucagagccugcaacgccucaucgacucccagauggaaacaucuugucagauuaccuucgaguuuguugaucaggaacaacugaaggaccccgugugcuaucugaaaaaggcuuuccuccuggugcaggauaucauggaggacacaaugagauuucgggauaacaccccuaaugccauugccaucguccagcuucaggagcugagccuccgccugaaauccuguuucacaaaggacuacgaggaacacgauaaggcuugcgugagaaccuuuuaugaaacgccccuucaacugcucgagaaaguuaagaacguguucaaugagaccaaaaaccugcuggacaaggauuggaauaucuuuagcaaaaacuguaauaacucuuucgccgaaugcuccagccaggacgucgugacaaagccugauuguaauugccucuaccccaaagcuauuccuucuuccgacccggccagcguuucuccccaucagccucuggcgcccuccauggccccuguggcuggacuuaccugggaggauagcgaaggcacagagggguccucucugcuccccggagaacagccgcugcacaccgucgacccuggcagcgccaagcaacggcccccucgcuccacgugucagagcuuugagccucccgagacacccguggugaaggacucuaccaucggcggguccccgcagcccagaccuagcgucggagcuuucaaccccggcauggaagauauucuugacucugccauggggacaaauuggguuccugaggaagcgagcggagaggccuccgaaauccccgugccgcaaggcaccgagcugucuccuagccggcccgggggaggcuccaugcagaccgagccugcucgccccagcaacuuucucucugccuccagcccucugcccgcuucugccaaaggccagcagccggccgaugugacagggacggcucugccuagagucggacccgugcggcccaccggccaagacuggaaucauacaccucagaagaccgaucacccguccgcgcuccugcgcgaucccccugaacccgggagcccuagaauuuccucucuucggccccagggacugagcaacccuuccacacucucugcccagccccaacugagccgcucccacagcucuggcuccguucuuccgcugggggagcucgaaggaagacggagcaccagagaccgccggucuccugcugagcccgaaggcggcccugccuccgagggggccgcuagaccccugccgcgcuucaauagcgugccucugacggacacaggacaugagcggcagucugaaggcagcuuuagcccccagcuccaggaguccgucuuccaucugcuugugccuucuguuauccuggugcuccuggccgucgggggacugcuuuucuauagauggcgccggagaucccaccaagaaccccagcgcgcggauagcccccucgagcagccugagggcuccccgcugacccaggacgaucggcaaguggaacugcccgucuga

SEQ ID NO: 3366 - RNA, 1893 nt, Artificial Sequence
  EAW85719 variant
auggcccugcccaccgcuagaccucuccugggcagcugcgggacaccggcccuuggaucccuucucuuccugcuguuuucucugggcugggugcagcccagccggacgcucgcgggggagaccggacaagaagcugccccucuggacggcguccuggccaaucccccuaacaucuccucucucagcccccgccagcugcuuggguucccuugugcugagguuuccggacugucuacagaaagagugcgggagcucgccguggcucuggcccagaagaacgucaaacuuagcaccgaacagcugcgcugccucgcgcacagacuguccgagccgcccgaggaucuggacgcccucccucuggaucuucugcucuuucugaaucccgacgcuuucagcggcccucaagccuguacacgguuuuucucucgcauuaccaaggcuaacguggaucuucugcccagaggcgccccggaacggcagcgccuccugccugcggcccuggcuugcuggggcguuagaggaucccuccugagcgaggccgacgugcgggcucuuggcgggcuggccugugaucuccccggacgcuuugucgccgaaucugcugaggugcugcuuccuagacugguuuccugccccggcccccucgaccaggaucagcaagaggcggcccgggcugcccugcaagggggaggcccuccguacgggcccccuagcacauggucuguguccaccauggacgcccugcgcgggcuccugcccguccuuggacagccuaucauuagaagcaucccccagggcauuguggcugccuggcggcagagauccucucgcgauccgagcuggcggcagccugaaagaacgauccugcgcccccgguucagacgcgagguggagaaaaccgcguguccuuccgggaagaaagcucgggagaucgacgaaagccucaucuuuuauaagaagugggagcuggaggccugcgucgaugccgcucugcuugccacacagauggacagaguuaaugcuauucccuucaccuacgaacaacucgacgugcugaaacauaagcuggaugagcucuauccucagggauaccccgaaucugugauucagcaccugggcuaucuuuuucugaaaauguccccggaggacauccgcaaguggaacgucacaagccucgaaacccugaaagcccugcuugaggugaauaaggggcaugagaugucuccucaggcgccccggagaccccucccucaaguugccacgcugauugaucgcuucgugaagggacggggccagcuggacaaagauacacucgacacccugacagcuuuuuacccgggcuaucuuuguagccugucccccgaagaacucucuagcgucccucccuccagcaucugggccgugagaccucaggaucuggauaccugcgacccccggcagcuggacguucuuuacccuaaggcucgccucgccuuccaaaacaugaaugggucugaauacuucgugaaaauucaguccuuucugggaggcgcgcccaccgaggaucugaaggcccucagccagcagaacgucucuauggaccuggcuacauucaugaaacuuagaacggacgccgugcugccgcucaccgucgcugaagugcaaaagcugcuggggccucacguugagggacuuaaagccgaggaacggcauagacccgugcgcgauuggauccuccggcagagacaggacgaucuggacacacugggccucgggcugcagggcggaaucccuaauggcuaucuuguccuggaucucuccaugcaagaggcccugagcgggacccccugucugcuuggaccgggcccugugcugacaguucucgcucugcuccuggcguccacccuugccuga

SEQ ID NO: 3367 - RNA, 1515 nt, Artificial Sequence
  CCDS46865.1 variant
auggaggcccugagagugcagauguucaugcccugcagcuuugaaucccucuaccugucuagcgcugagcacccuggcgccuccaagccgcccaucucuagcuccucuaugaccagccggauucuucugcgccaacagcucaugagagaacagaugcaggagcaagaacggcgcgagcagcagcagaaacugcaagcggcucaguucaugcagcagagagucccuguuucccaaacacccgccaucaacgugagcgugccuacgacccuucccucugccacacaggucccuauggaggugcugaagguucagacccaucucgaaaauccgacaaaauaucacauucaacaggcucagcggcagcaagugaagcaguaccuguccaccacacuggccaacaaacaugcuaaucagguccucagccugcccuguccuaaccagcccggggaccacgugaugccucccguuccgggaucuuccgccccuaauagccccauggcgaugcuuacccugaacucuaauugcgagaaggaaggcuuuuauaaguucgaggagcaaaaccgcgccgaauccgaguguccugggaugaauacgcauagcagagcuuccugcaugcagauggaugacgugaucgaugacauuaucucucucgaaagcuccuacaacgaggaaauccugggacuuauggaucccgcccugcagauggcuaauacccuccccgucagcggcaaccugauugaccuguaugggaaucagggacucccuccgcccggccugacaaucucuaacuccuguccugccaaucuucccaacauuaaacgggagcugaccgagagcgaagcgcgcgcccucgcuaaggagagacagaaaaaggauaaccacaaucugaucgaacggcgcagacgguuuaacauuaaugaccgcaucaaagagcuuggcacacugauuccuaagucuaacgaucccgacaugagauggaauaaggggaccauccucaaagccagcguggauuacauccggaagcugcaaagagaacagcagcgcgcuaaagagcuggagaaccggcaaaagaaacucgaacacgccaauagacaucugcuucugcgcauucaggagcucgaaaugcaggcccgggcucacggacugucccuuaucccgucuacgggccugugcagcccugaccucgugaacagaauuaucaagcaagagcccguccuggaaaauuguucccaggaucugcuccagcaucacgcggaccugacaugcaccacaacccuugaccugaccgaugggacaauuacguucaacaauaaccucggaaccggcacagaggccaaucaggcuuauagcguuccuaccaaaauggggucuaagcuggaggacauccugauggaugacacacuuucccccgugggagugaccgauccucuccugagcucugucucccccggcgccagcaagacguccucucgccggagcuccaugucuauggaagagacagaacacaccuguuga

SEQ ID NO: 3368 - RNA, 1260 nt, Artificial Sequence
  CCDS2913.1 variant
augcuggagaugcucgaauacaaccacuaucaagugcaaacccaucuggagaaucccacaaaguaccacauccagcaggcccagagacaacaggucaaacaguaucuuagcacgacccuggcuaacaagcaugccaaucagguucucucccugccuugcccgaaccaacccggcgaccacgugaugccucccgugccugggucuagcgcgcccaauuccccuauggcuaugcuuacacugaacucuaauugugaaaaagagggauucuacaaguuugaggaacagaaccgggccgagagcgaaugcccgggcaugaauacccauucccgcgccucuuguaugcagauggaugacgucauugaugacaucauuagccucgaguccagcuauaacgaagagauccuggggcugauggaucccgcucuccagauggccaauacacugccugugucuggaaaccuuauugaccuguacggcaaucaagggcuucccccucccggacugaccaucuccaacagcugcccggcuaaucuuccuaacaucaaaagagagcugacagccuguauuuuccccaccgaaucugaggcgcgggcccucgcuaaggaacgccagaagaaagauaaccacaaucugaucgagagacggcgcagauuuaacauuaaugaccggaucaaggaacugggcacgcucauuccuaaauccaacgaucccgacaugcgcuggaauaagggcaccauccugaaagccagcguugauuauauuagaaagcuccagcgggagcaacagcgcgcuaaggagcuggaaaacagacagaaaaagcucgagcacgccaaucggcaucugcuucugcgcauccaggaacucgagaugcaagcgagagcccacgggcugucucugauccccuccacaggacucugcagcccugaccuggugaaccggauuaucaaacaggaaccgguccuugagaauuguucccaggaucugcuccagcaucacgcugaccugaccugcacaaccacgcuugaccugacagauggcaccauuacauucaacaauaaccucgggaccggaaccgaggccaaucaggcuuacucugugcccacaaagaugggcagcaaacuggaagacauccugauggaugacacgcucuccccuguuggggugaccgauccccugcuuagcucugucuccccuggagccagcaagacaucuagcagacgcuccucuaugagcauggaggaaaccgagcacacauguuga

SEQ ID NO: 3369 - RNA, 1581 nt, Artificial Sequence
  XM_005264754 variant
augcaaagcgaguccggcaucgugcccgacuucgaagucggggaggaauuucacgaggaaccuaagaccuacuaugagcugaaaucucaaccgcucaagagcuccucuagcgccgagcaucccggagcuuccaaaccucccauuucuagcuccagcaugacaucuagaauccugcuucggcagcagcugaugcgcgaacagaugcaagagcaggaaagacgggagcagcagcaaaagcuccaggccgcgcaguucaugcagcaacgcguuccugugucccagacgcccgcuauuaacgugagcgucccuaccacacugccgucugccacccaggugcccauggagguucuuaaagugcaaacacaccuggaaaauccuaccaaguaccauauccagcaggcccagagacaacaggucaagcaguaucucuccacaacccuggcuaacaaacacgccaaucaggugcugagccuccccugcccuaaccaacccggcgaucauguuaugccgccugugcccgggucuuccgcuccuaauagccccauggccaugcugacgcuuaacuccaauugugagaaggaaggauuuuacaaauucgaggaacagaaccgggcggagucugagugccccggcaugaauacccacagccgcgccuccuguaugcagauggacgaugucauugacgauaucaucagccuggaaucuuccuauaacgaggaaauucucgggcugauggacccugcccuucagauggcuaauacacugccggugagcggaaaccucaucgaucuguacggcaaucaaggccugcccccucccgggcucaccauuucuaacagcugcccugcuaaucugcccaacaucaagagagagcuuacagccuguauuuuuccgaccgaauccgaggcgcgggcccuggcuaaagagcgccagaagaaggacaaccacaaucucaucgaaagacggcgcagauucaacauuaaugaucggaucaaagagcugggaacgcuuaucccuaagucuaacgaccccgauaugcgcuggaauaaaggcacaauucugaaggccagcguggacuauaucagaaaacuccagcgggaacagcaaagagcuaaggagcuggaaaaccgccagaaaaagcuggagcaugccaaucggcaccuccugcuucgcauucaggagcuggaaaugcaagccagagcucaugggcucucccugaucccuagcaccggacuuugcucucccgaucuggucaaccggauuaucaagcaggagccuguucucgaaaauuguucccaggaccugcugcagcaccacgcggaccucacaugcaccaccacacuggaucuuacggacggcaccaucacauuuaacaauaaccuggggaccggaacagaggccaaucaggcuuacagcgugcccaccaaaaugggcucuaagcucgaggauauucugauggacgauacgcuguccccggugggcgucacagacccucuucucagcuccgugucucccggggccagcaaaaccuccucuagacgcagcuccaugagcauggaagagaccgaacauacauguuga

SEQ ID NO: 3370 - RNA, 1065 nt, Artificial Sequence
  BAG52140 variant
auggcccccgcugccuggcugagaagcgcggcugcccgggcccuccugccuccgaugcuucugcuccugcuucagcccccuccccugcucgcucgcgcccugccucccgacgugcaccaucugcacgcugagagacggggcccucaaccguggcaugccgcgcuccccuccucuccugcccccgcuccugccacacaggaagcuccccgcccggccagcucccugagaccuccccggugcggggucccugaucccucugacggacuuagcgcgcgcaacagacagaagcggauccugcgcuuccccuggcagcucguucaagaacaggugagacagacaauggccgaggcucugaaagugugguccgaugucacgccucuuaccuuuacagaggugcacgaaggccgggccgacauuaugaucgauuucgcucgcuacuggcauggggacgaucugccguuugacggacccggcgggauucucgcccacgccuucuuuccuaagacccacagagagggagauguucauuucgacuaugaugagacauggaccaucggcgacgaucagggcacagaccugcugcaaguggcugcgcacgaauuugggcauguccucggacugcagcacaccacggccgcuaaagcccuuaugucugccuucuacaccuuucgguauccccugagccucuccccugacgauugucgcggcgugcagcaccuguacgggcagcccuggccgacaguuaccagcagaaccccugcucuuggaccccaagccggcauugacacaaaugagaucgcgccucuggaacccgaugcuccucccgacgccugcgaggccucuuucgaugcuguguccacgaucagaggggagcucuuuuucuuuaaggccggauucgucuggcggcugcgcggcggccagcugcagccgggguauccugcucucgccagccggcauuggcaaggacugcccucucccguggacgcggccuucgaagaugcucagggccacauuugguuuuuccaggggacaaccggaguguccaccccugccccgggcgucuga

SEQ ID NO: 3371 - RNA, 804 nt, Artificial Sequence
  AAV40839 variant
augagacugaccgugcucugcgccgucugucugcuucccggcagccuggcucucccucugccgcaggaggccgggggaauguccgaacuucaaugggagcaggcgcaggacuaccugaagcgguucuaucucuacgauucugaaacaaagaacgcuaauagccuggaggccaagcugaaagaaaugcagaaguuuuucggccuccccaucacggggaugcugaacucccgcguuauugagaucaugcaaaaaccuagaugcggagugcccgacguggccgaguauucucuuuuuccuaauagccccaaguggaccuccaaggucgugacauaccggauuguuucuuauacccgcgaucugccucacaucacaguggacagacucgucagcaaagcucugaacauguggggcaaggaaauuccgcuucauuuccggaaagugguuugggggaccgccgauaucaugaucggauuugcucgcggcgcccacggcgacuccuaccccuucgaugggccuggaaauacacuggcgcaugccuuugcucccggcaccgggcucggaggcgacgcccacuucgaugaggacgaaagauggacggaugggagcucucugggaauuaacuuucuguaugcugccacccaugagcucggccacucccugggcauggggcacagcucugacccuaaugcggugauguaccccacauacggaaacggcgauccgcagaauuucaaacuuucccaggacgacaucaaagggauucagaagcuguauggaaagcggagcaacucucgcaaaaaguga

SEQ ID NO: 3372 - RNA, 3768 nt, Artificial Sequence
  J05582.1 variant
augacccccggcacacagagcccuuucuuucugcuccugcuucugacggugcucaccgucguuacaggguccggacacgccucuagcaccccgggcggggagaaggaaacauccgcuacccaaagaucuagcgugcccuccucuacagagaaaaacgccgugagcaugaccuccagcguccugucuucccauagcccuggaucuggcuccagcacgacccaggggcaggacgugacacuugcgcccgcuaccgaaccugccucuggauccgccgcuacauggggccaggauguuaccagcgugcccgucacgcggccugcccugggcuccacaaccccgcccgcucacgacgugacaucugccccugauaauaagcccgcgccugggagcaccgcucccccggcccauggaguuaccuccgccccugacacacgccccgcuccuggcagcacggccccucccgcgcacggggugaccucugcccccgauacaagaccggcucccggauccaccgccccucccgcucauggcgucacaagcgccccugacacccggcccgccccggggucuacggcuccucccgcgcacggagugacaagcgccccugauacccgccccgcuccuggcuccaccgcucccccggcccacggcgugacaucugccccugacaccagacccgcccccgggagcacagcgccuccggcucauggagucacguccgcccccgauacccggccugcccccggcagcacagcuccucccgcccacgggguuaccucugcuccugacacacgccccgccccgggauccaccgcgccucccgcccauggcgugacgagcgcuccugauaccagacccgccccggggucuacagcuccucccgcccacggagugaccuccgcgccugacacacggcccgcccccggcagcaccgcuccuccggcccacggcgucacguccgcucccgauacacgcccugcccccgggucuaccgccccucccgcucauggagugacaagcgcgccugacaccagaccggcccccggcuccaccgcuccucccgcccacgggguuacaucugccccugacacgcggcccgcuccgggaagcaccgccccucccgcgcauggcgugacauccgcucccgauacccgcccugcccccgggagcacagccccuccggcucacggcgucaccucugcccccgacacgagaccugcgcccggauccacagcuccucccgcccauggcgugaccagcgccccggauacccggccugcucccgggucuacagccccucccgcucacggaguuaccuccgccccugacacacgccccgcgccgggcagcacggccccucccgcucacggggugaccucugcccccgauacaagaccugcuccgggaagcaccgcucccccugcccauggcgucacauccgcccccgacacccggccugcgcccgggagcacggccccuccggcucacggcgugaccucugcccccgauacaagaccugcccccggauccaccgcuccucccgcccauggcgucacaagcgcgccggacacccgcccugcucccggguccacagcucccccugcccacggagugaccucugcccccgauacgcggccugccccgggcagcacagcgcccccugcucacgggguuaccuccgcccccgacaccagaccugcccccggaucuacagcuccgccugcccauggcgugaccagcgcucccgauacgcgcccugcccccggguccacagcgccucccgcccacggcgucaccucugcuccggacacacggccugcccccggaagcaccgcucccccugcccauggcgugacauccgccccggacaccagacccgcuccugggagcacggcgcccccugcccacggaguuaccucugcucccgauacacgcccugcccccggcuccaccgccccgccugcucauggggugacaagcgcccccgacacccggccugcgcccggaucuacggcuccgccugcccacggcgucacauccgcccccgauaccagacccgcuccugggagcacagcgcccccugcccacggcgugaccucugccccggacacccgccccgcuccuggauccacagcucccccugcccauggcgugacgagcgcccccgauacccggccugcuccgggguccacagcgcccccugcccacggaguuaccagcgcccccgacacaagaccugcucccggcucuaccgccccgccugcucauggggucacgagcgcccccgauacacgccccgccccuggauccaccgcucccccugcgcacggcgugaccucugccccggacacacggcccgcuccuggcagcaccgcucccccugcccauggggugacauccgcccccgauacgagaccggccccuggaucuaccgcgcccccugcccacggcgucacaagcgcucccgacacccggccggccccuggguccacagcuccucccgcccacggagugaccucugcgcccgauacgcgccccgccccuggcagcaccgcuccgcccgcccaugggguuacauccgcuccugacaccagacccgccccuggaagcacagcucccccugcccacggcgugaccucugcgccggauacacggcccgccccuggcuccacggcucccccugcccauggggucaccagcgcucccgacacaagaccggccccuggaucuaccgccccucccgcgcacggcgugaccuccgcucccgacacacgccccgccccugggagcacggcuccgcccgcccacggaguuaccuccgccccugauaaccggcccgcucucggcucuacagccccucccgugcauaaugucaccagcgcguccgggagcgccucuggauccgcuagcacacuggugcacaacggcaccucugccagagcuacgacaaccccggccagcaaauccaccccuuucucuauccccagccaucacuccgacacaccuaccacacuggcgucucauagcaccaagacggaugccuccagcacacaccacucuuccguucccccucucaccagcuccaaucauucuacaagcccccaacuguccaccggcgugagcuuuuucuuucuuucuuuccacauuuccaaccugcaguuuaauagcucucucgaggacccguccacggauuacuaucaggaacugcagcgcgacaucagcgagauguuccuucaaauuuacaaacaagggggauuucugggccucucuaacaucaaguucagacccggguccgucguggugcagcugacccuggcuuuucgggagggaacaauuaauguccaugauguugaaacccaguucaaccaguauaagacagaggccgcuagccgcuacaaucucaccaucucugacgugagcguguccgaugucccuuuucccuucucugcccagagcggcgcuggggugccuggauggggcaucgcccugcuuguucuggugugcguccucguggcgcuggccauuguuuaucuuaucgcucuggccgugugucagugcagacggaaaaacuacggccaacucgacauuuucccggcucgcgauacauaucaccccauguccgaauacccuaccuaccacacgcaugggagauaugugcccccuagcuccacagaccggucucccuacgagaaggucagcgccggaaauggcggguccucucugagcuauaccaacccugccguugcggcugccuccgccaaucuguga

SEQ ID NO: 3373 - RNA, 2136 nt, Artificial Sequence
  NM_032853 variant
augauggccgacgcuaaguacgugcugugcagaugggagaaacggcucuggcccgccaagguccuggcgcgcaccgcuacaagcacgaaaaacaagagacggaaagaauauuuccuugccguucagauccugucccucgaggaaaagauuaaggugaaaucuaccgagguggaaauccuggaaaagagccaaauugaggccaucgcuuccucucuugccagccagaaugaagucccugcugccccgcuggaggaacucgcguaccgcagaucccugcggguggcccuggauguucucucugagggcagcauuuggucccaggagagcucugcugggacaggacgcgccgacagaucccugcggggcaaacccauggaacacgugagcucuccuugugauuccaacucuagcucccuuccccgcggggacguccugggaagcuccagaccucaccggcgcagacccugcgugcagcaaucucucagcuccagcuuuaccugugagaaggauccugaaugcaaaguugaccacaagaagggccugcggaaaucugagaauccgcgcgggccccuugugcugccugcuggaggcggcgcccaggaugaauccgggagcagaauccaucacaagaacuggacacucgcgucuaaacggggaggcaauagcgcccagaaggcuucccugugucugaacgggucuagccucuccgaggacgauaccgagagagacaugggaagcaaaggcgggucuugggccgcucccucccugccuagcggaguccgcgaagaugaccccugcgccaaugccgagggccaugauccgggccuuccucuggggucucucacagcucccccugcgcccgaacccuccgccuguagcgagccuggagaaugcccggcuaagaaacggcccagacuggacggcucccagcgcccucccgccgugcaacuugagccuauggccgcuggggccgcgcccucuccgggaccuggccccgggccucgggagagcgugacccccagauccacggcucgccugggaccucccccgucucacgccagcgccgacgcuacccggugucucccuugccccgauucccagaagcuggaaaaggagugucagagcucugaagaguccaugggcagcaacucuaugagauccauccuggaagaggacgaggaagaugaggaacccccucgcguccuccuguaucacgagccgcggagcuucgagguuggcaugcuuguguggcauaaacacaagaaauaccccuuuuggccugccguggucaagucugugagacagcgcgacaaaaaggcuagcguucuguauauugaagggcauaugaaucccaagaugaaaggauucacagugucccucaagagccugaaacacuuugauugcaaggagaaacaaacccuucugaaccaggcccgggaagacuucaaucaggauaucggcuggugcgucucucucauuacagacuacagagugcggcugggguguggauccuuugcgggcagcuuccuggaguauuacgccgcugauaucuccuacccuguucgcaagucuauucaacaggacgugcucgggaccaagcugccccagcuuagcaaaggcuccccugaggagcccgucgugggaugcccgcugggccagagacaaccuugucggaagaugcuccccgauagaucucgcgccgcucgggacagagccaaccagaaacuggucgaguauaucgugaaggcgaaaggggccgaaagccaucugcgcgcuauucuuaaguccagaaagccuucucgguggcuccagacguuucugagcuccagccaguacguuacaugcguggagaccuaucuggaagacgagggacaacucgaucuggucgugaaauaccuucagggcguuuaucaggaagugggggccaagguccugcagcgcacaaauggagacagaauccgguucauccucgaugugcugcugcccgaggcuauuaucugugccauuucugccguggacgagguugauuacaaaaccgcugaagagaaguauaucaaaggcccgucccuuagcuaccgcgaaaaggagauuuuugacaaccaacuccuggaagagagaaaucggcgcagacgguga

SEQ ID NO: 3374 - RNA, 438 nt, Artificial Sequence
  AAD44697 variant
augaccgugcacaaccuguaccucuucgacagaaauggcgucugccugcauuauagcgaguggcaccggaagaaacaggccgggauccccaaggaagaggaauacaaacuuauguauggaaugcuguuuuccauucgcucuuucguuagcaagauguccccucucgauaugaaagacggcuuucuggcuuuccaaacaucuagauacaaacuucauuauuacgagacgccgaccgggaucaagguggugaugaacacagaucugggagucggccccauucgggacgugcuccaccauaucuauagcgcccuguacguugaacugguggucaagaauccucucuguccccuggggcagaccgugcaguccgagcuuuuucgcucuagacuggauagcuacguucggucccucccuuucuuuagcgcgcgcgcuggauga

SEQ ID NO: 3375 - RNA, 1395 nt, Artificial Sequence
  AAH02712 variant
augcccagcugcuccaccucuacaaugccuggcaugaucuguaagaacccggaccuggaguucgauagccuccagcccugcuuuuacccugacgaagaugacuucuauuuugggggacccgauuccacgccucccggcgaggacauuuggaaaaaguucgaacugcuuccuaccccgccccugucuccuagcagaggguuugccgagcacuccucugaacccccuagcugggugacagagaugcuccuggagaaugaacuuuggggaucccccgcugaggaagaugccuucggccucgggggacugggcggccugaccccgaacccugucauccugcaagacuguauguggagcggguuuucugcgcgggagaaacucgagcgcgcuguuuccgaaaagcugcagcauggaagaggacccccuacagccgggagcaccgcccagucucccggagcuggcgccgcuucccccgccgggcggggacacggcggcgcggccggggcuggacgcgccggcgcugcccuuccugcggagcuggcccauccggcugccgaaugcguggaucccgcuguggucuucccuuuucccgugaauaaaagagagccugcccccguuccggccgcuccugcgagcgcccccgcugccgggccugccguggcuucuggagccggcauugcggcucccgccggggccccuggagucgcucccccgcggccuggcggccgccagacauccgggggagaccacaaggcccucagcaccuccggcgaagauacgcugucugacagcgaugacgaggacgaugaggaagaggacgaagaggaagagaucgaugugguuaccguggagaagagacgguccagcucuaacacaaaagcugucaccacauucaccauuacggugcgccccaagaaugccgcgcuugggcccggcagagcccaauccagcgaacugauccucaaacggugucugccuauccaucagcagcacaacuacgcugccccgucucccuauguggagagcgaagacgcuccuccccagaagaaaauuaaguccgaggccucuccucgcccccucaagagcgucaucccucccaaagcgaagucccugagcccgagaaauucugauuccgaagacagcgagcggcgcagaaaccacaauauucuggagcggcaaagacgcaacgaucuucggucuuccuuucugacacucagagaccauguuccugaacuggugaaaaaugagaaggccgcuaaaguggucauccuuaagaaagccaccgaauacgugcacagccugcaggcugaggagcaucagcuccugcuggaaaaggagaagcuccaggcccgccaacagcagcugcuuaaaaagauugaacacgcccggacaugcuga

SEQ ID NO: 3376 - RNA, 3132 nt, Artificial Sequence
  AAC78645 variant
augccccugcucgagggcagcgugggggucgaagaccugguucuucuggagccucucguggaagagucccugcuuaagaaccugcagcucagauacgaaaauaaagagaucuauaccuacauuggaaacguggucaucucugugaauccguaucaacagcugcccauuuacggcccugaguucaucgccaaguaucaggauuacacauuuuaugaacugaaaccccacauuuacgcucucgccaacguugcguaccagagccugcgggaccgcgauagagaccaaugcauccuuaucacgggggaguccggaucuggcaagaccgaagcuagcaaacuggugauguccuaugucgccgccgugugugggaagggagagcagguuaauucugugaaggagcagcuccugcagagcaacccuguccuugaagcguucggcaaugccaaaacaauucggaacaauaacuccagccgcuuuggcaaguacauggauaucgaguucgacuuuaaagggucuccccugggaggcgugauuaccaauuaucuccuggaaaaguccagacuggugaaacaacucaagggggagcggaacuuccauaucuuuuaccagcugcuugcuggagccgaugaacagcugcucaaggcgcugaaacuugagcgcgacacaaccggcuaugccuaccugaaucacgaggucagcagaguugaugggauggacgaugcuucuuccuuccgggccgugcagagcgcuauggccgugauuggauuuucugaagaggaaauccgccaaguccucgaggugacauccaugguucugaagcugggcaacgugcucgucgcggacgaguuccaggccagcggcauuccugcuuccgggaucagagauggacggggcgugcgcgagaucggggagaugguuggacuuaauucugaagagguggaaagagcccugugcagccggaccauggagacggcuaaagaaaaggucgugaccgcccugaacgucaugcaggcccaauaugcucgcgacgcgcucgccaaaaacauuuacuccagacuguuugacuggaucgugaaucggauuaacgagagcaucaagguuggcauuggggagaaaaagaaggugaugggaguccuugauaucuacggcuucgaaauccuggaggacaauucuuuugaacaguucgugauuaacuauuguaaugagaaacuccagcagguuuucaucgagaugacacugaaggaagaacaagaagaguacaaaagagaaggcauuccguggaccaagguggauuauuuugacaacgggaucauuugcaaacugaucgagcauaaucagcgcggaauccucgcuaugcuggaugaggaaugucuucggcccggcgucguguccgacagcacauuccuggccaagcucaaccagcuguuuucuaagcacgggcauuacgagagcaaagugacccagaaugcccaaagacaguaugaucacacgaugggacuguccugcuuccgcauuugucacuacgcuggcaagguuacauauaacgucaccucuuuuaucgacaaaaauaacgaucuucucuuccgggaccugcugcaggccauguggaaggcgcagcauccucuccugagaagccuuuuucccgaagggaauccuaaacaggcuucccugaagcggcccccgacagccggcgcccaauucaagagcucuguggcuauucucaugaaaaaccuguacuccaagagcccuaauuacauccggugcauuaaacccaacgagcaccagcagagaggacaauuuucuuccgaucugguggccacccaggcucgcuaucuuggccuccuggaaaacguccgggugagacgcgccggguacgcgcaucggcagggauauggcccuuuccuggagagauaccggcuccugagccgcuccaccuggccccacuggaaugggggagacagagagggcguugaaaaggugcuuggggagcugucuaugagcuccggcgaacucgccuuuggaaaaacaaagaucuucauucggucucccaagacgcuguuuuaucuggaggaacaaagacgccuucggcuccagcagcuggcuacccugauccagaaaaucuacagaggcuggcgcuguagaacacacuaucaacucaugcgcaagagccagauucugaucuccagcugguuccgcgggaacaugcagaaaaagugcuacggaaaaauuaaggccucuguccuucugauccaggcuuucgugagaggcuggaaagcccggaagaauuaccgcaaguauuuuagauccgaggcggcccucacccuggcugacuucauuuacaaaagcaugguucaaaaguuucugcuugggcucaaaaacaaucugccuucuacaaacgugcuggauaagaccuggccggccgcucccuauaaaugucucuccacggccaaucaggagcugcagcagcuuuucuaccaauggaagugcaagcgguuucgcgaccagcugagcccuaaacaggucgaaauccucagagagaagcugugcgccucugaacuguucaaaggaaagaaagcuagcuauccccaauccgugccuauccccuuuuguggcgauuacauugggcuucagggcaacccgaagcugcagaagcucaaaggaggcgaggaggggccuguucugauggcggaagccgugaagaaagucaaucggggaaacggcaagacaagcucucgcauccuccugcuuaccaaagggcaugugauucugaccgacacaaagaagucccaggcuaaaaucgugauuggacucgauaaugucgccggcguuagcgugaccucccugaaggacgggcuguucucucuucaccugagcgagauguccucugugggcagcaaaggagauuuucuccuggucuccgaacaugugaucgagcuccugacaaagauguauagagccguucuugacgcuacgcaacggcagcugaccgugacagucaccgaaaaauucucugugagauuuaaggagaacagcguugccgugaaagucgugcagggccccgcugggggagauaauuccaagcuccgcuacaagaaaaagggcagccacugccuggagguuacagugcaguga

SEQ ID NO: 3377 - RNA, 3411 nt, Artificial Sequence
  AAH53558 variant
auggccaagauggaggugaaaaccagccugcucgacaacaugaucggcgucggggauaugguucugcuugaaccccugaaugaggaaacauucauuaacaaucucaagaaaagauuugaccacuccgagaucuacacguauauuggaucuguggugaucagcgucaacccuuaccggucccugccgauuuauucucccgaaaagguggaggaguaccgcaauagaaacuucuaugaacuuagcccucauaucuuugcucuguccgaugaggccuaccggucucuccgcgaccaggauaaagaccaaugcauccugauuaccggcgaaagcggggcgggaaagacagaggcuuccaagcugguuaugagcuauguggccgccgucuguggcaaaggggcugaggugaaucagguuaaggaacagcuccugcagucuaaccccgugcuugaggccuucggaaaugcuaaaaccgucagaaacgauaauuccagccgguuuggcaaguacauggacaucgaauuugauuuuaaaggcgacccucuugggggagugauuucuaacuaccuccuggagaagucccgcguggucaagcaacccagaggcgaacggaauuuccacguuuucuaucagcuucugagcggggccucugaggagcuccugaacaaacugaagcucgaacgcgauuucuccagauacaauuaucugagccuugacuccgcgaaagugaacggaguggaugacgccgcuaacuuucggacaguccgcaaugccaugcagaucgugggcuucauggaccaugaggcugaaucuguucuggccguggucgcggccgugcucaagcuggggaacauugaguuuaaaccugaaagcagaguuaauggacuugaugaguccaagaucaaagacaagaacgagcugaaggaaauuugcgagcucaccggcaucgaucagagcgugcuggaacgggcuuucucuuuccgcacagucgaggccaaacaagaaaagguguccaccacgcugaaugucgcucaggccuacuaugccagagacgcucucgcgaaaaaccuguacagccggcuguuuucuuggcuggugaauagaaucaacgagagcauuaaggcccagaccaaaguucgcaagaaggugaugggcguccucgauaucuauggguucgagauuuuugaagacaauuccuucgagcaguuuaucauuaacuacuguaaugaaaaacugcaacagaucuucaucgagcuuacacugaaggaggaacaggaggaauacauucgggaggauaucgaauggacccacauugacuauuuuaacaaugcuaucauuugcgaucucaucgagaacaauacaaacggaauccuggccaugcuggacgaggaaugucucagaccgggcaccgugacggaugagacauuccuggaaaaacuuaaccaaguuugcgccacccaucagcacuuugagucucgcaugagcaaguguucccgguuccugaaugacacaagccucccccacucuugcuuucgcauucagcauuacgcugggaaagugcuguaucaggucgaaggauucguggacaagaacaaugaucugcuuuacagagaccucucccaagccauguggaaggcgagccacgcucugaucaaaucucuguuuccugagggcaaccccgccaagauuaaucucaaacggccucccaccgccgggucccaguucaaggcuagcguggccacccugaugaaaaaccuucagacaaagaauccgaacuauaucagauguauuaagccuaaugauaaaaaggcugcccauaucuucaacgaggcgcugguuugccaccagauucgcuaccucggacugcuggaaaauguccgggugagacgcgccggcuaugcuuuucggcaagccuacgagcccugucuugaaagauacaaaaugcucugcaagcagacguggccucacuggaaaggccccgcucgguccgggguggagguccuguucaacgaacuggagauccccguggaggaauauucuuuuggacgcagcaagaucuucauuagaaauccucggacccucuuuaaacuggaggaccuuagaaagcagcgccuggaagaucucgccacacugauccagaagauuuaccggggcuggaaaugcagaacccauuuccugcuuaugaagaaaucccaaaucguuauugcggccugguaucgcagauacgcucagcagaagcgguaucagcaaacaaaaucuagcgcccucgugauccaguccuacauccgcggguggaaggcuagaaagauucugcgggagcugaaacaccagaagcgcuguaaagaggccgucaccacgaucgccgcuuauuggcauggaacacaagcgagacgggaacuccgcagacugaaggaggaagcccggaacaaacacgcuauugccgugaucugggccuacuggcuuggcagcaaggcucgcagagagcugaagcggcucaaagaagaggccagacgcaagcaugcgguugcugugauuugggccuacuggcuggggcugaaaguccggagagaguaucgcaaguuuuuccgggccaaugcuggcaaaaagaucuacgaauuuacccuucagagaaucgugcagaaguauuuccucgagaugaaaaacaagaugccgucucugucccccauugacaaaaacuggccuagccgccccuaccuguuucucgauucuacccacaaggaacugaaacggaucuuccaccuuuggagaugcaagaaauaucgcgaccaguuuacagaucaacagaagcugauuuacgaggaaaagcucgaggccuccgagcuguucaaagacaagaaagcgcuguauccuagcucuguuggacagcccuuccagggcgcuuaccuugaaaucaauaagaacccgaaauacaagaagcugaaagaugccauugaggaaaagaucaucauugccgagguggucaauaaaaucaaccgggcuaauggaaagagcaccuccagaauuuuucuccugacaaacaauaaccuccugcuugccgaccagaaaagcgggcaaaucaagucugaagugccucugguggaugucacgaagguuuccaugagcucccagaaugacggcuucuuugcugugcaucucaaagaggggucugaggccgcgagcaagggagacuuccuguuuuccucugaucaccugauugaaauggccaccaaacuuuaucggacaacccugagccagacaaagcaaaaacucaacaucgagauuuccgacgaguuccuggugcaguuucgccaggauaaggucugugugaaguucauccaaggcaaucagaaaaacgggucuguuccuaccugcaagcggaaaaauaacagacuccuggaaguggcuguccccuga

SEQ ID NO: 3378 - RNA, 3192 nt, Artificial Sequence
  CCDS42226.1 variant
auggcccuccagguggagcucguccccaccggcgaaaucauuagaguugugcacccucaucggccgugcaagcuggcucuugggagcgacggagugcgcgucacaauggaguccgcccugacggcgagagaucgggugggcguucaagacuucgugcuccuggaaaacuuuaccucugaggcugccuucaucgaaaaucuucgcagacgguuucgcgagaaccugauuuacacauauaucgggcccguccucgugagcguuaauccuuacagagaucugcagauuuauucccggcagcacauggagcgcuacagaggagugucuuucuaugaagugcccccucaucuguuugccgucgcugacaccguguaccgggcccuccgcacagagagacgggaucaggcugucaugaucagcggcgaauccggggccggaaaaaccgaggcgacaaagcgccugcuucaauucuaugccgagaccugucccgcuccugaaagaggcggcgccguucgggacagacugcuccagucuaacccggugcuggaggcuuuugggaaugccaaaacgcuucgcaacgauaauagcucccgguucggaaaguacauggacgugcaguuugauuucaaaggcgcgcccgucgggggacacauccugagcuaccuccuggaaaagucuagagugguucaucagaaccacggcgagcgcaauuuucacauuuucuaucaacugcucgaagggggagaggaggaaacccugcggagacuuggccuggagcgcaacccucaguccuaccucuaucuggugaagggccagugcgccaaagucagcucuaucaaugacaaguccgauuggaaagugguucggaaggcucuuacagugauugacuuuaccgaagaugaggucgaagaccugcucagcaucguggccucuguccugcaucuggggaacauucacuucgcugccaaugaggaguccaacgcccaggugacaaccgaaaaucaacucaaauaccugacgagacuucugagcguugagggauccacacuccgcgaagcucugacccaucggaagaucauugcgaagggcgaggaacuucugucuccccucaaccuggagcaggccgcuuaugccagagacgcccuggcuaaagccguguacagccgcacauucaccuggcucgucgggaagaucaaccggucccuggcgagcaaagauguggagucuccuuccuggagaagcaccacaguucuuggacugcucgacaucuauggcuuugaaguguuccagcacaauucuuuugagcaauucuguauuaacuacugcaaugaaaagcugcagcagcuguuuaucgagcuuacgcucaaaagcgagcaggaagaguacgaagcugaggggauugccugggaacccguccaauauuucaacaauaagaucauuugugaucugguggaggagaaauuuaagggaaucaucuccauucuggacgaagagugccuccggccgggcgaagccaccgaucugacauuccuugagaagcuggaagacaccgugaaacaccauccucacuuucucacacauaagcuggcugaucagcgcaccagaaaaucucugggccggggagaguucagacuucuccacuacgccggagagguuacguauagcgucacaggcuuucuggacaagaacaaugaucugcuguuccgcaaccugaaagaaaccauguguuccagcaagaaucccaucaugucucagugcuuugaccgguccgagcuuagcgauaagaaaagaccugaaaccguggcuacacaguucaagaugucucugcuccaacugguggagauucugcaguccaaagaacccgccuacguccgcuguaucaagcccaacgacgcgaaacagccugggagauucgacgaggugcuuauucggcaucagguuaaguaucucggacugcuggagaaucuccgcgugagacgggccggcuuugcuuaccgcagaaaguaugaagccuuccugcaacgguacaaaagccuuugcccggagaccuggcccacaugggcugggcgcccucaggauggcgucgccgugcugguuagacaccucggauacaagcccgaagaguauaaaaugggccggacgaagaucuuuauccgcuucccuaaaacccuguuugcgacagaggacgcccuggaagugagacggcagucccuugcuaccaagauucaggccgcuuggagaggguuccacuggcgccaaaaguuucuccgggucaaaagaucugccaucuguauucagagcugguggcgcggaacacugggccggagaaaggccgcuaaacgcaagugggcggcccagaccauccggagacugauucgcggguucgugcuccggcaugcucccagaugcccggagaacgccuuuuuccuggaucacguucggacguccuuucuucugaaucuccgcagacaacugccucagaacgugcuggacaccucuuggcccacaccucccccugcccuucgggaagcuagcgagcugcuccgcgaacugugcaucaaaaauauggucuggaaguacuguagauccauuagccccgaguggaaacagcagcuccaacagaaggccguggcgucugagaucuucaaggggaaaaaggauaacuauccgcaguccgugccucggcuguuuaucagcaccagacuuggcacagacgaaauuucuccccgcguccugcaggcucucggguccgagcccauccaauacgccguuccuguggugaaauaugaucggaagggcuacaaaccgagaagccgccagcugcugcuuacccccaacgccgucgugauuguugaagacgcuaaggugaagcagcggaucgauuaugccaaucugacgggaauuucugucagcucccucagcgacucucuguucgugcuccauguucagagagcggauaacaaacaaaagggcgacgugguccugcaguccgaucacgugaucgagacacuuaccaaaacagcucugagcgccaaucgcguuaacuccaucaauauuaaccaggggucuaucaccuucgccggaggcccugggcgggacggaaccauugacuuuacacccggcagcgaacuccugaucacgaaggcuaaaaaugggcaccuggccguggucgcuccuagacuuaacucccgcuga

SEQ ID NO: 3379 - RNA, 3021 nt, Artificial Sequence
  AAI46764 variant
auggccgagcaggaaagccuggaguucggcaaggcugacuuugugcucauggauaccgucuccaugcccgaguucauggccaaccugagacuucgguuugagaaagggcgcaucuacacauucauuggagaaguuguggugucugucaauccuuauaagcugcucaacaucuacggcagagacacgauugagcaauauaaagggcgggagcuguacgaacgcccgccccaccuuuuugcgaucgcugaugccgccuauaaggcuaugaaaagacggagcaaggauaccugcauugugaucuccggagagucuggcgccgggaagacagaagcuagcaaauacaucaugcaguauauugccgcgaucaccaauccuucccagcgcgccgagguugagagagugaagaacaugcugcucaaaucuaauuguguccuggaggcuuucggaaacgccaagacaaaucggaacgacaauagcucccgcuuuggcaaauacauggacauuaacuucgauuuuaagggcgaccccaucgggggacauauuaauaacuaccugcucgaaaagagcagagugaucguucagcaaccuggcgaacggucuuuccacuccuuuuaucagcugcuucaagggggaagcgagcagaugcugcgcucucuccaucugcagaaaucccuuagcucuuacaauuauauucacgugggcgcucagcugaaguccagcaucaacgaugccgcggaguucagagucguggccgacgcuaugaaagugaucggguuuaagcccgaagagauucagaccgucuacaaaauccucgccgcuauucugcaucugggaaaucucaaguucguuguggauggcgacacaccucugaucgaaaacggcaaaguggucuccauuaucgccgagcuucugucuaccaagacggauaugguggaaaaggcccuccuguaucggaccguugcuacagggcgcgacaucauugacaaacagcacaccgagcaagaagcgagcuacggaagagaugccuucgcuaaggccaucuaugagcggcuguuuugcuggauugugacaagaaucaacgacauuaucgaggucaaaaauuacgauaccacgauccacggcaagaacacagugauugggguucuggacaucuacggauucgaaauuuuugauaauaacuccuucgagcaguuuuguaucaauuauugcaacgaaaaacuccagcaacuguucauucagcuggugcucaagcaggagcaggaagaguaccaacgcgagggcaucccguggaagcauauugacuauuuuaauaaccagaucaucgucgaucugguggaacagcagcacaaagggauuaucgccauucuugacgaugcuuguaugaaugucggaaaggugaccgacgagauguuccuggaagcccucaacagcaaacugggcaagcaugcgcacuuuucuucccggaaacuuugcgcuagcgauaagauccuggaguucgacagagacuuucgcauucggcacuacgccggcgauguuguguauucugucaucggguucaucgacaagaauaaagauacacucuuucaagacuucaagagacugauguacaacagcuccaaucccgugcugaaaaacauguggccugagggaaagcucucuauuaccgaaguuaccaaacgcccccugacagccgcuacgcuuuucaagaauagcaugaucgcccugguggauaaccucgcuuccaaggagccuuauuacguccgguguauuaaacccaacgacaagaaaagcccgcagaucuuugaugacgaaagaugccgccaucagguggaguaccugggccugcuugaaaaugugcggguuagacgcgccggguucgcguuucggcagaccuaugagaaguuccuccacagauacaaaaugauuucugaguuuacauggccuaaccaugaucugcccuccgacaaggaagccgucaaaaagcugaucgagcgguguggauuccaagaugacguggcuuauggcaagaccaaaaucuuuauucgcacaccuagaacccucuucacgcuggaagaacuucgggcccagaugcugaucagaauugugcucuuucugcagaaggucuggcgcgggacacuggcucggaugagauacaaacgcaccaaggccgcgcuuaccaucauuagauauuaccggcgcuauaaaguuaagagcuacauccacgaaguggccagacgguuccauggcgugaagacaaugcgcgauuacggaaaacacgucaaguggcccucucccccuaaagugcucagacgguuugaggaggcucugcagaccaucuucaaucgcuggagagccucccaacugauuaagagcaucccggcuuccgaccucccccagguucgggccaaaguggccgcugucgaaaugcugaagggccagcgcgcggaccuugggcugcaaagagccugggagggaaacuaucucgcuucuaagccugauacaccccagacgagcggcaccuuugugccuguugccaaugaacugaaacggaaggacaaauacaugaacgugcuguucuccugccacgucagaaaggugaaucgcuucucuaaaguggaggaucgggccauuuuugucacagacagacaucuuuauaagauggaucccaccaagcaguacaaaguuaugaagacaaucccgcucuauaaccugaccgggcugagcguguccaauggaaaagaccagcucguggucuuccacacgaaggauaacaaagaccugauugugugucuuuuuagcaagcaaccuacccaugaaucucgcaucggcgagcugguuggggugcucgucaaucacuucaaauccgagaagcggcaccuucaggugaacguuacaaaucccgugcagugcagccugcauggcaagaaaugcaccgucucuguggaaacaagacuuaaccagccucaacccgauuuuaccaagaaucgcuccggauucauucucagcguuccuggcaacuga

SEQ ID NO: 3380 - RNA, 3327 nt, Artificial Sequence
  CCDS32254.1 variant
augggcagcaaggggguguaccaguaucacuggcaaucccauaacgucaaacacucuggaguugacgauauggugcugcucagcaagaucaccgaaaauuccauuguggaaaaccugaaaaagagauacauggacgauuauaucuucacauacauuggcucuguccuuaucagcgugaaucccuuuaaacagaugccuuauuucggggagaaggaaauugagauguaccagggagccgcucaguaugaaaacccgccccauaucuacgcccuggcggacaauauguaccggaacaugaucauugaucgcgagaaucaaugcguuaucauuuccggcgagucuggggcuggaaagacgguggccgccaaauauaucaugagcuacauuuccagagucagcggcggcgggaccaaggugcagcacguuaaagacaucauucuccagucuaacccucugcuugaggcuuuuggaaaugccaagacagugcggaacaauaacuccagccgcuucggcaaauauuuugagauccaguucucucccgggggagaaccugauggcgggaagaucuccaauuuucugcucgaaaagagcagagucgugaugcggaaccccggagagcgcucuuuccauaucuuuuaccaacugauugaaggcgcuuccgccgagcagaaacacagccugggcauuaccuccauggacuauuacuauuaccucucucugagcggguccuacaagguggaugacaucgaugacagacgggaguuccaggagacacuucacgcgaugaaugucauuggaaucuuugccgaggaacagacccugguucuccaaaucguggcuggcauucugcaucuugggaacaucagcuucaaagaggugggaaacuaugccgcugucgaaucugaggaauuucuggccuucccugcguaccuccugggcauuaaucaggaucgccugaaggagaaacucacauccagacagauggacagcaaguggggagggaaaucugaaagcauccacgugacccugaacguugagcaagccuguuauacgcgggacgcucuugccaaggcucugcaugcccgcguguucgauuuucucgucgacuccauuaauaaggccauggagaaagaucacgaagaguacaacaucggcgugcuggacaucuauggcuucgaaauuuuucagaagaauggguucgagcaguuuugcaucaacuucguuaaugaaaaacuucagcaaauuuuuaucgagcugacccucaaggcugagcaggaagaguacgugcaggaaggaauuagauggacaccgaucgaguauuucaacaauaaaauugucugugaucugaucgagaacaaggugaaucccccuggcaucaugucuauucuggacgaugucugcgcgaccaugcacgccgugggggaaggagcugaccagacacuccugcaaaaacuucagaugcagaucggcagccaugagcacuuuaacuccuggaaucagggguucauuauccaucacuacgccggcaaaguuagcuacgauauggacggauuuugugaacggaaccgcgaugugcuguucauggaccucauugagcugaugcaaucuuccgaacuucccuuuaucaagagccuguucccugagaaucuccaggccgacaaaaagggcagacccaccacggcugggucuaaaaucaagaagcaggccaacgaucuggucuccacacugaugaaaugcaccccgcauuauauucgguguaucaagccuaacgagacaaagaagcccagagacugggaagagagccgcgugaaacaccagguugaauaccucggacugaaggagaauauucgggugagacgcgcgggcuaugcuuaccggagaaucuuccaaaaguuucuucagcgcuaugccauucugaccaaagccaccuggccuuccuggcagggggaagagaagcaaggaguccuccaucugcugcagucugugaacauggauagcgaccaguuccagcuuggccgguccaaaguguuuaucaaggcucccgagucucucuuccugcuggaagagaugagagaacgcaaauacgauggguaugcccggguuauccaaaagagcuggagaaaauuugucgcucgcaagaaguacgugcagaugcgggaggaagccuccgaccuccugcuuaauaaaaaggagagacggcgcaacagcauuaauagaaacuucaucggcgauuacauuggaauggaggaacaccccgagcugcagcaguuugugggcaaacgggaaaagaucgacuucgcggauacagucacgaaauaugacagacgcuuuaagggggugaagcgggaucuccugcugaccccuaaaugccuuuaccucauuggaagagagaagguuaaacaaggcccggacaaggggcuggugaaagagguccugaagcgcaagaucgaaaucgagcggauucucucugugucccugagcacaaugcaggaugacaucuucauucuucacgaacaggaguaugacucucugcucgaauccguuuuuaaaaccgaguuccugagccugcuugccaagagauacgaggagaaaacacagaagcaacucccccugaaauuuucuaauacccuggaacucaagcugaagaaagaaaacuggggaccuuggagcgcuggcgggucccgccaggugcaguuccaucaaggcuucggagaucuugccguccugaagcccagcaauaaagugcuccagguuucuaucggcccugggcugcccaagaacuccagaccgacgcggcgcaauacaacccagaacaccggauauagcuccggcacacagaaugcuaacuacccugugagagccgcgcccccucccccuggguaucaccaaaauggagucauucggaaccaguacgugcccuacccgcacgccccuggcucucagcgcagcaaccagaaaucccuguauaccucuauggcuagaccuccccuuccccggcaacagagcacauccucugaccgcgugagccagacgccggagucccucgauuuucugaagguccccgaccagggggccgcuggcguuagacggcaaaccacaagcagaccucccccugccggaggccgccccaaaccucagcccaagccgaagccucaggugccccaguguaaagcccuguacgcuuaugaugcgcaagacaccgaugaacucucuuucaaugccaacgacaucauugauaucaucaaggaggacccuuccgggugguggacaggacggcugagaggcaaacaggggcuuuuucccaauaacuacgugaccaagauuuga

SEQ ID NO: 3381 - RNA, 3297 nt, Artificial Sequence
  AAH28071 variant
augggcagcaaggagagauuccacuggcagucccauaacgugaaacaaucuggggucgacgauaugguucugcucccccagaucaccgaagacgccauugcugccaaucugcggaagcgcuuuauggaugacuacaucuucacauauauuggaagcgugcuuaucuccgugaacccuuuuaaacagaugccguacuucacggauagagagauugaccuguaucagggcgcggcucaauacgaaaaucccccucacaucuaugcccucaccgauaacauguaccggaauaugcugaucgacugcgagaaccagugugucauuaucucuggggaaagcggagccggcaagacaguggcugccaaauauauuaugggguacaucuccaagguuucuggaggcggcgagaaggugcagcaugucaaagauauuauccuucagagcaauccccugcucgaggcuuuugggaacgccaagaccgugcgcaauaacaauuccagcagauucggaaaauacuuugaaauucaauucucucggggcggggagccugacggaggcaagaucuccaacuuucugcuggaaaaaucccgcguugugaugcagaaugagaacgagagaaauuuccacaucuauuaccagcuccuggaaggggcgucucaggagcaacggcagaaccuuggacugaugacacccgauuauuacuauuaccucaaccaguccgacaccuaucaagucgauggcacagacgaccgcagcgauuuuggcgaaacccugucugccaugcaagugauugggaucccuccguccauucagcagcuugugcugcagcucgucgcuggaauccugcaucugggcaauauuagcuucugcgaggacgggaacuacgccagaguugaauccguggaucuccuggcuuuucccgccuaccuucugggaaucgacucuggccggcuccaggagaagcugacgagccgcaagauggauuccagauggggagggcggagcgagucuaucaaugugacccuuaacgucgaacaggcggccuauacacgcgacgcucuggccaaaggccucuacgcuagacuguucgauuuccugguggaggccauuaaucgggccaugcagaagccucaagaagaguauuccaucggcguucucgacauuuacggguuugaaaucuuccagaaaaacggauuugagcaguucuguauuaauuuugugaacgagaagcugcagcaaaucuucaucgaacuuacccugaaagcugagcaggaagaguauguccaggaaggcauuagauggacacccauccaguacuuuaauaacaaggugguuugcgaucucauugagaauaaacugagcccucccgggaucaugucugugcuugacgaugucugugcgaccaugcacgccacgggaggcggggcugaccaaacacugcuccagaagcugcaggccgccgugggcacccacgagcauuucaacagcugguccgcuggauuugucauucaccauuaugccggcaaggugucuuacgacguuagcggguucugcgaacgcaaucgggaugugcuguuuuccgaccucaucgagcugaugcaaacaagcgaacaggcguuccuuagaaugcuguuuccggagaaacucgauggagacaagaaaggccgcccuucuaccgcuggguccaagauuaaaaagcaggccaacgaucuggucgccacccugaugcgguguacaccccacuacaucagaugcaucaagccuaaugagacgaaacgcccccgggacugggaagagaacagagugaagcaccagguugaauaucuuggacucaaagagaacauucgcgugcggagagcuggcuucgccuaccgccggcaauucgcuaaguuucugcagagauaugccauccugacccccgaaacauggccucgguggcgcggggaugagagacagggcguccagcaucuccugcgggcggugaauauggagccggaccaauaccagaugggaagcaccaaaguguucguuaagaaccccgaaucucuuuuucugcucgaggaagucagagagcgcaaguucgauggcuuugcccggacaauucagaaggcuuggagacgccacguggccgugagaaaauaugaagagaugcgggaggaagcuagcaauauccugcugaacaaaaaggagcgcagacggaauagcauuaaccgcaauuucgucggggacuaccuuggacucgaagagagaccugaacugcggcaguuucugggcaaacgcgagagaguggauuucgccgacuccguuaccaaguaugaucggcgcuuuaagcccaucaaaagagaccucauccugacgccuaaguguguguacgucauugggcgggagaaagugaagaaaggacccgaaaagggccaaguuugcgaggugcuuaaaaagaaggucgacauccaggcgcugagaggggugucucucagcacacgccaggaugacuucuuuauucugcaagaagaugccgcugacuccuuccuggagucuguuuuuaaaaccgaguucgugagccuucucuguaagcgguucgaagaggccaccagacgcccgcugccucugacauuuuccgauacccuccaguuccgggucaaaaaggaaggcuggggaggcgggggaacaagaagcgugacguuuucucgcggcuucggggaccuggcugugcuuaaagucggaggccggacccugacaguuuccgugggggauggccuccccaagagcucuaagccuaccagaaaaggaauggccaagggcaaaccccgccgguccagccaggccccuacaagagcugcgcccgccccgccucgggggauggaccgcaacggagugccucccucugcuagaggcgggccccugccgcuggagaucaugagcggaggcggcacccaucggcccccucgcgggcccccuuccacgagccuuggagccucuagacggcccagagcccgcccucccuccgaacacaauaccgaguuucucaacgucccggaucagggcauggcugggaugcaacggaagagaagcgugggacagcgcccuguucccggcguggggcggccuaaaccccagccgagaacacauggaccucgcugccgggcccuguaccaguaugucggccaagacguggaugagcuguccuucaauguuaacgaagugauugagauccucauggaagaccccucuggcugguggaaggggagacugcacggacaggagggccuuuuuccugggaauuacgucgaaaagaucuga

SEQ ID NO: 3382 - RNA, 3057 nt, Artificial Sequence
  CCDS34629.1 variant
auggaggacgaagagggccccgaauacgggaagccugauuucgugcugcucgaccaggucaccauggaggauuuuaugagaaaccugcaacuucgguucgaaaaaggacgcaucuauacauacauuggcgagguucuggugagcgugaauccguaucaggagcucccccuguacgggccugaagccaucgcuagauaucagggacgggagcuuuacgaaagacccccucaccuguaugccgucgcgaacgcugccuacaaggccaugaaacaucgcucccgggacacgugcauugugaucucuggcgagagcggggcuggaaagaccgaggccuccaaacacauuaugcaguacaucgcugccguuacaaaucccucucaacgcgcggaaguggagagagucaaggaugugcuccucaagagcaccuguguucuggaagccuuuggcaacgcucggacaaaucgcaaccauaauuccucuagauucggcaaauauauggacaucaacuuugauuucaagggggacccuauuggaggccacauccauagcuaccugcuggagaaaucccgggugcuuaagcagcacgucggggaacgcaauuuucacgccuucuaucagcugcucagaggaagcgaggauaaacagcugcaugagcuucaccuggaacggaacccggcuguguacaauuuuacccaucaaggcgccgggcucaacaugacagugcacucugcgcuggacuccgaugagcagagccaccaggccgucaccgaagcuaugcgcguuauuggauucucucccgaggaaguggaguccgugcauagaauccuggccgcuauucuccaccugggcaauaucgaguuugucgaaacggaggaaggcgggcuucagaaggagggacuggccguggccgaagaggcucucguugaccauguggcggagcugaccgccacaccucgggaucuuguccugagaagccuccuggcucgcaccguggccucuggcgggcgggaacugauugagaagggacacacagccgcugaagccuccuaugcgagagacgcuugcgccaaagccguuuaccaacgccucuucgaguggguggucaaccggaucaauagcgugauggagcccagaggccgcgacccucggagagaugggaaggacaccgucaucggagugcuggauauuuauggcuuugaaguuuuccccgugaacuccuucgagcaguuuuguaucaacuacugcaaugaaaaacuucagcaacuguucauucagcucauccugaagcaggagcaggaagaguacgagcgcgaaggcauuacguggcaaucugucgaguauuuuaacaaugcuacaaucguggaccuuguugaacggccgcauagagggauccuggccgugcucgaugaggcuuguagcuccgccggaaccauuacagaccgcaucuuccugcagacccuggauaugcaccaccggcaucaccuccauuacaccagcagacagcugugcccuacagacaaaacgauggaauuuggccgggauuuccgcauuaagcacuaugcgggggacgucaccuacucuguggagggauuuaucgauaaaaacagagacuuccuuuuucaggacuucaagcggcugcucuauaauuccacagaucccacccugagagccauguggccugacggccaacaggauauuacagaggugaccaagcgcccccugacggcugggacacuuuuuaaaaacagcaugguugcccucgucgaaaaucuggcuucuaaggagcccuucuacgugcgguguaucaaaccuaacgaagacaagguggccggcaaacuggaugagaaucacugcagacaucaggucgcguaucucggacugcuugaaaacgugcgcguuagacgggccggcuuugcuagccgccagccguacuccagauuccugcuccgguacaagaugaccugugaguauaccuggcccaaucaucugcuggggucugacaaggccgcugugagcgcccuucucgagcaacacggacugcagggcgaugucgccuucgggcacuccaaacuguuuauccgcagcccuagaacacucgugacccuggaacagucucgggcucgccuuauucccaucauuguucugcuccugcagaaggcguggagaggaacacuggcccgguggcgcugcagacggcuuagagcuaucuacacgauuaugcgcugguuccggagacauaaagugcgcgcccaccucgccgagcugcaacggagauuucaggcugcccgccagccuccccuguauggccgggaccucgucuggccgcugccucccgcggugcuucaaccuuuccaggauaccugucacgcucuguuuugcagauggcgcgcccggcagcucguuaagaacauucccccuuccgacaugccccagaucaaagccaagguggcugccaugggggcgcugcaaggccugagacaggauuggggaugccggcgcgcuugggccagagacuaccuuagcucugccacagauaauccgaccgcuuccagccucuucgcccagcggcugaagacacugcaggacaaagacggcuuuggggcuguccucuucuccucucaugugcgcaaggugaacagauuucacaaaauccggaauagagcccugcuucugaccgaucaacaucucuauaagcuggacccugaucgccaguaccgggucaugagagcgguuccccuggaagccgugacgggacuuagcgugaccuccggcggggaccagcuggucgugcuccacgcucgcggacaggaugaccugguugugugucuccaucggucuagacccccucuggauaaccgcgucggcgagcuuguggggguucuggccgcucacugccaaggcgagggacggacacucgaagugagagucagcgacuguaucccgcugucccaccgcggcgugagacggcugauuagcguugagccccgcccugaacagcccgagccugauuucagaugcgcccgggggucuuuuacccuucuguggcccucccgcuga

SEQ ID NO: 3383 - RNA, 3069 nt, Artificial Sequence
  CCDS53826.1 variant
auggagggcgcccugaccgcuagagacaagguggggguccaggauuucguucuccuggacgccuacacaagcgaauccgcguuuguggauaaccuucggaaacgcuucucugagaaucugaucuauacguacauuggaacccuccuggugagcgucaaccccuaucaagaacuuggcaucuacacagugucccagauggagcuguaucaggggguuaacuuuuucgaacucccuccgcacguguacgcuauugccgacaaugccuauagaaugaugugcgcugagcugaauaaccauuuuauccugauuucuggagagagcggcgccgggaagaccgaggcuuccaaaaagauccucgaguacuucgccgucacaugucccaugacccagucucugcaaaucgcgcgggaucgccuucuguuuagcaauccugugcucgaagccuucggaaacgcuagaacacugcggaaugacaacuccagccgcuuuggcaaauacauggauauucaguucgacuuucagggcauccccguugggggacacauuaucucuuaucuuauugagaaguccagaguggucuaccagaaugagggcgaacggaacuuccauaucuuuuaucaacugcucgccgggggagaggaagaacgccugagcuaccugggccucgaaagagauccucagcuguauaaguaccuuucucaggggcacugcgcuaaagaguccagcauuucugacaagaaugauuggaaaaccguguccaacgccuucagcgugaucgacuucacggaggcggaucuggaaaaucucuuuggaaucauugccuccguccugcaucuuggcaacaucggcuucgaggaagacgaccaggggugugcuaccauucccgauacacacgagaucaaguggauugccaaacugcucggaguucacccuucugugcugcuggaagcucucacccaucggaagaucgaggccaagacagaggaagugaucugcccgcugacccuugagcugagcgucuaugcccgcgacgcuauggcgaaagccguguacggcagaacguuuacauggcucguuaacaagauuaauuccagccuggugaacaaagauuucacccggaagacagucaucgggcuucuggacauuuacggauuugaaguguucgauaaaaauggcuuugagcaauucuguaucaacuauugcaaugaaaagcuccagcagcugcugauugagcgcacccucaaagcugagcaagccgaauacgagauggaagggaucgagugggagcccaucaaguauuuuaacaauaagauuaucugugaccugguugaagagagacacaaaggaauuaucucuauucuugaugaagagugcauccggccuggccccgccaccgaccuguccuuccucgaaaagcuggaggagaaagugggcaagcaugcucacuuugaaacaagaaaacuggccgggccuaagggacgcaagcggauuggcuggauggaguucagacuucuccacuacgcgggggaagucacguauuguaccaaaggauuucuggagaagaacaaugaucugcucuaccgccaucugaaagaagugcuuugcaagagcaaaaacaucauccugcgggaguguuuccuccuggcugagcuggaaaauagacgccggcccccgacagucggcacccaguucaagaacucucuuagcucccuccuggagacacugauuucuaaggaaccuagcuauaucagaugcauuaaacccaaugaccgcaaggagccuuccaaauuugaugacuuccucauccggcaccagauuaaguaccuggggcuuauggaacaucugagagugcgccgggccggcuuugccuacagacggaaauaugagcacuuccuccagcgcuacaagagccugugccccgacaccuggccccauuggcacggaccuccggcugagggcguugaaagacugaucaaguauaucggguacaaacccgaggaauauaaacuuggaaaaacgaagauuuuuauccgguucccuagaacacucuuugccaccgaggaugcuuucgaguuuucuaaacaccaacugguggcccgcauucaggcgaccuacaagcggugucugggcagacgcgaauaugucaaaaagagacaggccgcuaucaagcucgaggcccauuggcgcggggcucuggcccggaaagcgauucagagacggaagugggccgugcgcaucaucagaaaauucauuaagggauuuaucucccggaacaaaccccuuugcccugacaaugaagaguucauuguuuuugugcgcaagaacuacauccugaaccucagauaccaucugcccaagacaguccuggauaaaagcuggcuucggccgccuggcauucucgaaaaugcuucugaccugcugcgcaagaugugugugagaaaccucgugcaaaaauauugccgggggaucaccgccgagagaaaggcuaugaugcagcagaaaguugucacauccgagaucuuccgcggccggaaggauggauacacggaaagccugaaucagcccuucgugaacuccagaauugacgagggcgauaucaauccuaaggugcuucaacugauuucucacgaaaagauccaguaugggguccccgugauuaaguacgaccgcaaaggauuuaaggcccggcagagacagcucauccugacccaaaaagccgcuuauguuguggagcuggcgaagauuaagcagaaaaucgaauacagcgcccuuaagggcgucuccacaucuaaccugagcgaugggauccucgugauucacguuuccccugaggacagcaaacagaagggagaugcugugcugcaauguggccacgucuucgaggccgugaccaaacucguuaugcuggugaagaaagaaaauaucgucaacguggugcaggggucucuucaguuuuucauuucccccggcaaggagggaacaaucgucuuugacaccggccuggaggaacagguuuauaagaauaaaaacgggcaacucacgguggugagcguccgccggaagucuuga

SEQ ID NO: 3384 - RNA, 2379 nt, Artificial Sequence
  BAC84969 variant
augaucaccgugaaccccgacggcaagauuauggucagacggugccugguuacacuccgcccuuucagacuguuugugcuugggaucggauucuuuacgcuguguuuccucaugaccagccugggcgggcaguuuuccgcccggcgccuuggagauucuccguucacaauuagaaccgaggugaugggcgggcccgaaagccggggaguccugcgcaaaauguccgaccuccuggagcugauggugaagagaauggaugcucucgcccggcuggaaaauucuagcgagcuucaccgcgcgggcggcgaccugcauuuuccugcugauagaaugcccccuggggccggacucauggaacggauccaagccauugcucagaacguuuccgacaucgccgugaaagucgaucagauccugcgccacucucuucugcuccauagcaagguguccgagggcagacgggaccagugcgaggcucccagcgauccuaaauucccggacuguucugggaagguugaauggaugcgcgccagauggacauccgaucccugcuacgcguuuuucggaguggacggcaccgaguguagcuuucugauuuaucugucugaagucgagugguucugcccuccccucccuuggcggaaucaaacagccgcucagagagcccccaagccgcugccuaaagugcaggcuguguuucgcuccaaccuuagccaucugcucgaucugauggggucuggaaaggagucccuuaucuucaugaaaaagcggaccaaaagacugacggcccagugggcgcucgccgcucaacgccuggcccagaagcugggcgcuacccagcgggaccagaagcaaauucucguccacaucggcuuccugacagaagagagcggggacguuuucucccccagagugcuuaaaggaggcccucugggggaaauggugcagugggccgauauucucaccgcccuguacguccuuggacacggccugcgcgugacaguuucucucaaggagcugcagagcaaucugggggugccucccggacggggcuccuguccccucaccaugccgcugcccuucgaccuuaucuauacggauuaccacggccugcaacagaugaaaagacauauggggcucagcuuuaagaaauaucgcugccggauuagagucaucgacacauucggaaccgaaccugcuuacaaccacgaggaguaugcgacacugcauggcuaccgcaccaauuggggguacuggaaccugaaucccaagcaguuuaugaccauguucccucacacacccgauaacucuuuuaugggauucguguccgaggaacuuaaugaaacggagaaacggcucaucaagggcgggaaggccagcaacauggcuguuguguauggcaaagaagccucuauuuggaagcugcagggaaaagagaaguuucugggcauccucaauaaauacauggagauucacgggaccgucuauuacgaaagccaaagaccgccugaggugcccgccuucgucaagaaccauggacugcuuccucagcccgaauuucagcagcugcuccggaaggcuaaacuguucaucggcuuuggguucccuuaugagggacccgccccgcuggaagcgauugcuaauggcuguaucuuccuucaaucccgcuuuucuccuccccacagcucccucaaccaugaguucuuuagagggaagcccacaagccgggagguguucucucagcacccuuacgccgaaaacuuuaucggcaaaccgcauguuuggaccguggacuauaauaacuccgaggaauuugaggccgcuauuaaggccaucaugagaacacaggucgaucccuaccugccuuacgaguauaccugcgaaggaaugcuggagcgcauucacgcuuacauccagcaccaagacuuuugucgggcccccgauccugcgcuccccgaagcccaugcuccucagagccccuucgugcuggccccgaaugcuacgcaccuugagugggccagaaacacaucucuggcgccuggcgccuggcccccugcucaugcccuccgcgcuuggcuggccguucccgggagagccugcaccgauaccugccuggaccacggacuuauuugugaaccguccuuuuucccuuuucucaauagccaggacgcuuuccugaaacuccaggugcccugcgacuccacagagucugagaugaaccaccuguauccugcguuugcccaacccggccaggaauguuaccugcagaaggagccccuucuguucagcugcgcuggguccaauaccaaguaucggcgccucuguccuugcagagauuuccggaaaggacaagucgcccugugucagggcugccuguga

SEQ ID NO: 3385 - RNA, 36 nt, Artificial Sequence; identical to SEQ ID NO: 2377
  AF164963.1 variant

SEQ ID NO: 3386 - RNA, 2211 nt, Artificial Sequence
  AAI11702 variant
augaaggagaugagcgccaacaccgugcuggacucccagagacaacagaaacacuacggcaucacaucucccauuagccucgcuuccccuaaggaaaucgaucauauuuauacgcagaaacugaucgacgccaugaagccguucggggucuuugaggaugaagaggaacuuaaucaccggcugguugugcucggaaaacugaacaaucuugugaaggaguggauuucugacgucagcgaguccaagaaccugcccccuucugugguugcgaccgugggcgggaaaaucuucacauuuggaagcuaccgccucggcguccauaccaagggggcugauaucgacgcccugugcguggcccccagacacguugaacgguccgauuucuuucagagcuucuuugagaaacugaagcaucaagacggcauucgcaaucucagagcuguggaagaugccuucgucccugugaucaaauuugaguucgacggaauugagaucgaucugguguuugcucggcuugccauucagacaaucucugacaaccuggaucuccgcgacgacuccagacugcggagccuugauauucgcuguaucagaucucugaauggcugccgggucaccgacgaaauccuccaccugguucccaacaaggagacauuccgccugacccucagagcggugaagcugugggccaaacggcgcgggauuuauuccaauaugcuuggauuucugggcggggugagcugggcuaugcucgucgccagaacgugucagcuguacccuaacgcugccgcgucuacccuugugcacaaguucuuccugguguuuuccaaaugggaauggccgaaucccguucuccugaagcagccugaggaaagcaaccugaaucuccccgucugggauccucgggugaaccccuccgacagauaucaucugaugccgaucauuaccccugccuacccccaacaaaauucuacauauaacguuagcacauccacccgcacggugauggucgaggaguucaaacagggacuugcugugacagaugaaauccugcagggcaagagcgacuggucuaaacuccuggagccucccaacuuuuuccagaaguaccggcacuacauuguccuuaccgccuccgcuagcacagaagagaaucaucuggaauggguggggcucguugagucuaagaucagagugcuggucggaaaccuggagcgcaaugaauuuaucacccucgcccacgugaacccccagagcuucccuggcaauaaagagcaccauaaggauaacaauuauguuuccaugugguuucugggcauuaucuuccggagaguggaaaacgccgagucugucaauauugaccuuaccuacgauauccagagcuuuacagacacgguguaucgccaagcuaacaauauuaacaugcugaaagaagggaugaagaucgaggcgacccacgugaaaaagaagcagcuccaucacuaccugccggccgagauccugcagaaaaagaaaaagcagucccuuagcgauguuaaucggucuuccggaggccuccaaagcaaaagacugucucuggacuccagcugccucgacuccucucgcgauacagacaacgggacccccuucaauagcccugcuuccaagucugauagccccuccgucggagaaacagagcggaacagcgccgaaccugccgcugugauuguggagaagccccugucugucccgccugcccagggccuuuccauccccgugauuggggcgaaaguugacagcaccgugaagacggucucuccucccacaguguguaccaucccuaccguugugggaagaaacgucauuccccgcaucacaaccccgcauaauccugcucagggccagccccaccugaacggcauguccaauauuacaaaaacggugacccccaagcggagccacucuccuagcaucgaugggacaccgaaaagacucaaggacguugagaaguuuauccggcuggaauccaccuucaaagauccccgcacagccgaggaaagaaagcggaaaagcguggacgccauuggaggcgagucuaugccuauccccaccauugauacguccagaaagaaacgccugccuagcaaggaacuucccgacuccucuagcccuguccccgcuaacaauauccgggugauuaaaaacuccaucagacucacccugaaucgcuga

SEQ ID NO: 3387 - RNA, 1377 nt, Artificial Sequence
  AAG28389 variant
augagcaccgagggcggguucggaggcacauccucuagcgacgcccagcaaucccugcagucuuuuuggcccagagugauggaagagauccggaaccucacggucaaggauuuccgcguucaggaacugccucuugcuagaauuaaaaagaucaugaaacuggacgaggaugugaagaugauuagcgccgaagcgccggugcucuuugcuaaagccgcccagaucuucauuaccgagcugacacuucgggcuuggauccacaccgaggacaauaagcgcagaacacugcaacggaacgauaucgccauggcuauuaccaaguuugaccaguucgauuuucucaucgacauugucccccgcgaugaacugaaaccucccaagagacaggaggaagugcggcaguccguuacgccugccgagcccgugcaauacuauuucacccuggcgcagcagccuacggccguccaggugcaagggcagcagcaaggacagcagaccacaucuagcaccacaaccauccagccgggccaaauuaucauugcucagccccagcaggggcaaacgacaccuguuaccaugcaagugggagagggccagcagguccagaucgugcaggcccagccccagggccaagcucagcaggcccaauccgggacaggacagaccaugcaagugaugcagcagaucauuaccaauacaggcgaaauccagcagauuccuguccagcucaacgcggggcaacugcaguacauccgccuugcccagcccguuagcggaacacagguggugcaaggccagauucagacccuggcuacaaaugcccaacaggggcagagaaacgcuucucagggaaaaccgcggcgcugccucaaggagacccugcaaaucacacagaccgaaguccagcagggccaacagcaguuuucccaguucacggacggccaaagaaauagcgugcagcaggcccggguuucugagcuuacaggggaagccgagccucgcgaggugaaagcuaccggaaacuccacccccuguacaagcucucugccuaccacacauccucccucccacagagcgggcgccagcugcgucuguugcucccagccccaacagucuagcacguccccgcccccuagcgaugcucuccagugggugguuguggaagucucugggacccccaaucaacuggagacacaucgggaacugcacgccccucuccccggaaugaccucccugagcccgcuucauccuucucagcagcuguaucagauccaacaggugacaaugcccgccggccaggaccucgcucagccuauguuuauucaaagcgccaaccagcccuccgaugggcaggcgccucaggucaccggagacuga

SEQ ID NO: 3388 - RNA, 2802 nt, Artificial Sequence
  CCDS33423.1 variant
augagaauggccgcuaccgccugggcgggccugcaggggcccccucucccgacacugugccccgcugugcggacgggacuuuacugucgcgaccaagcccacgccgagagaugggcuaugaccagcgaaacauccucuggcagccauugcgcccggucccgcaugcugagacggcgcgcucaggaggaagauucuaccguccucaucgacguuagcccucccgaggccgaaaagagaggguccuauggaucuacagcgcacgccagcgagccuggcgggcagcaggcugccgcuugucgggccggaucccccgcgaaaccucgcauugccgauuucgugcuggugugggaggaagaccuuaagcuggauagacaacaggacagcgcugcccgggaucgcaccgacaugcauagaacauggcgggagaccuuucucgauaaccugcgcgcugccggccugugcgucgaccagcaggaugugcaagacggcaauacgaccguucacuacgcccuccugucugcuuccugggcggugcuuuguuauuacgccgaagaucugagacucaaacugccgcuucaggagcugcccaaccaggcuagcaauuggucugccgggcuccuggccuggcugggaaucccuaacguccuccuggaggugguucccgacgugccucccgaauauuacuccugccgguucagagucaauaaacuuccgcgcuuucugggcagcgacaaccaggauacauucuuuaccucuacaaagcggcaucaaauucucuucgagauccuggcuaagaccccuuaugggcacgaaaagaaaaaucuucugggcauucaccagcuccuggccgagggagugcuguccgcggcuuuuccccuccaugacgggccuuucaagacgccucccgaaggaccccaggccccgagacugaaccaacgccaggugcuuuuucagcacugggcccgguggggcaaauggaauaaguaccagccccuggaucaugucagacgcuacuucggcgagaaaguugcucucuauuuugccuggcugggguucuacacaggauggcuucugccugcugccguggugggcacccucgucuuucuggugggguguuuccugguuuucagcgacauccccacacaagagcucugcggauccaaggauucuuuugaaauguguccucugugccuugacugucccuucuggcugcucagcuccgcgugcgcccuggcucaggccggccggcuguuugaucacgggggaaccguguucuuuagccuuuucauggcucucugggccguccugcugcucgaguauuggaagagaaaaucugcgacccuggccuaccgcugggacugcuccgauuaugaagacacagaggaacggccgagaccucaguuugcugccagcgcucccaugacggccccuaaccccaucaccggcgaggaugagccuuacuuccccgaacgcucucgggccagacggaugcuugcuggcagcgugguuauuguggucaugguggcggucgugguuaugugucugguguccaucauucucuaucgcgccaucauggcuauugucgugucuagaagcgggaauacacugcuggccgccugggcuucccggaucgccagccuuaccggaucuguugugaaccucgucuuuauucugauccuguccaagaucuacgugagccucgcgcacgugcugacaagaugggagaugcaucgcacccagacgaaauucgaagacgcuuuuacacuuaagguuuucauuuuucaauucgucaauuucuacucuuccccgguguauaucgccuuuuucaaaggccgguuugugggguacccuggaaacuaucacacccuguucggcgucagaaaugaggaaugcgccgcugggggcugucucauugagcuggcccaggagcugcuugugaucaugguuggaaagcagguuauuaacaacaugcaggaaguccucauccccaaacugaagggcugguggcaaaaguuucgccugagaagcaaaaagcggaaagcgggggcuuccgccggagccucucagggccccugggaggacgauuacgaacucgugccuugcgaggggcuguucgacgaguaucuugaaaugguucugcaguuuggauucgugaccaucuuugucgcugccuguccgcucgcuccccuguucgcccugcuuaauaacuggguggagauucgccucgaugcgagaaaguuuguuugcgaauaccggcgcccuguggccgagagagcucaggacaucggcauuugguuccauauccuggccgggcugacacaccucgcugucauuagcaaugccuuucugcuugccuucuccucugauuuccugccccgggcuuauuaccgcuggaccagagcgcaugaccuccggggcuuucugaacuucacacuggcccgcgcuccuagcuccuuugccgccgcucacaauagaacgugucgguacagagccuuccgcgaugacgauggacacuauagccaaaccuacuggaaccuucuggcgauccggcucgcuuuugugaucguguucgaacaugucguguuuucugugggcagacugcucgaccugcuugugcccgauauuccugaguccgucgagaucaaagugaagcgcgaauauuaccuggccaagcaggcccucgcugagaaugaaguucuguucgggacaaacggaaccaaagacgagcagcccgaaggcagcgagcugucuucccacuggacaccguuuaccgugccuaaggccagccaacuucagcaguga

SEQ ID NO: 3389 - RNA, 885 nt, Artificial Sequence
  AAA36380 variant
auggaggacagcauggauauggacaugagcccccugagaccucagaacuaccucuucggcugcgaacugaaggccgauaaagacuaucacuuuaagguggauaaugacgagaacgaacaucaacuuucucugcggaccgucagccucggggcuggagccaaagaugagcugcacaucguugaagcggaggcuaugaauuacgagggcuccccgauuaaggugacacuugccacgcugaaaaugucugugcagcccaccgucagccucgggggauucgaaaucacaccucccgugguucugcgccugaaguguggcuccgggccugugcauauuucuggacagcaccucgucgccguggaggaagacgcugagagcgaggaugaagaggaagaggacguuaagcugcuuuccaucagcggcaaaagaucugcccccggcgggggauccaaggugccucagaaaaaggucaaacuggcugccgaugaagacgaugacgacgaugacgaggaggaugacgaugaagacgaugacgaugacgauuuugacgacgaggaagcggaggaaaaggccccggugaagaaaagcauucgggauacccccgcuaagaacgcccaaaaaucuaaucagaacggcaaggacuccaaaccuagcucuacaccccgcuccaaggggcaggagagcuucaaaaagcaggagaagaccccuaaaacacccaagggaccguccucuguggaagauaucaaagcuaagaugcaagccagcaucgagaaaggcgggucccucccuaaggucgaagcgaaguuuauuaauuauguuaaaaacugcuucagaaugaccgaccaggaggccauccaggaucuguggcaguggcggaagucccuuuga

SEQ ID NO: 3390 - RNA, 3915 nt, Artificial Sequence
  CCDS47686.1 variant
augcagcugaagaucaugcccaaaaagaaaagacucagcgccggccgggugccucugauucuuuuccugugccaaaugaucuccgcucucgaggucccgcuggaccccaaacuucuggaagaucucguucagccucccaccauuacacagcagucuccuaaagacuacaucauugauccccgcgagaacaucgugauccaaugugaagccaaggggaagccuccgcccagcuuuuccuggacgagaaauggaacccacuucgacauugauaaagacccucuggugacaaugaagcccggcaccgggacacugaucauuaacaucaugucugagggaaaagcggaaaccuaugagggcgucuaccagugcacagcucggaaugagcgcggggccgccgugagcaacaauauuguugugagaccuucccggucuccccucuggaccaaggaaaaacuggagccgaucacgcuucagagcggacagucccugguccucccuuguagacccccuauuggccugcccccucccaucaucuuuuggauggauaacagcuuccaacgccuuccgcagucugaacgggugucccagggccugaauggggaccucuauuuuagcaacguucugcccgaggauacccgcgaggacuacauuugcuaugcuagauucaaucauacacagaccauccaacagaagcagccuauuucugugaaggucaucuccguggaugaacugaacgacacaauugccgcuaaucucagcgauaccgaguuuuacggagccaaaucuucccgggaaagacccccuacguuccugacacccgagggcaacgcgagcaauaaggaggaacuucgcgggaacgugcugucccucgaguguaucgccgaaggacugccgaccccuaucauuuauugggcuaaagaggacggcaugcuucccaagaaucggacagucuacaaaaacuuugaaaagacccugcaaaucauucacguuucugaggccgacagcgggaacuaccagugcaucgcuaaaaaugcccucggagcgauucaucacaccaucuccgugcgcgugaaggccgcuccuuauuggaucacagcuccccagaaccugguccugagcccuggcgaagauggcacgcucauuuguagagcuaaugggaaccccaagccgcggaucucuuggcugaccaauggagugccuauugagaucgcccccgacgaucccuccagaaaaauugacggcgauacaaucauuuucagcaacguucaggagcgcucuagcgccguguaccaaugcaaugcuuccaacgaauauggguaccuucuggcgaaugccuuugucaacgugcucgcugagccuccgcggauccugacccccgccaauacacuuuaucagguuaucgccaacagaccugcucugcucgacugugccuucuuuggaucuccccugccuaccauugaaugguucaagggcgcgaaagggagcgcucugcaugaggauaucuacgugcuccacgaaaauggaacgcuggagauucccgucgcccagaaggacuccacaggcaccuauaccugcguggcccgcaacaaacuuggcauggcuaagaaugagguccaccuggaaaucaaggauccuacauggauugugaaacagcccgaguacgccguugugcaacgggggagcauggucucuuucgaauguaaggugaaacaugaccacacccucucccugacaguucuguggcuuaaggauaacagagagcucccgagcgacgagcgcuuuacgguggacaaagaucaucuggucguggcugacgugucugaugacgauuccggaaccuacacaugcguugccaacaccacacuggacagcgucuccgcgucugccgugcucagcguggucgcuccuacccccacgccugcccccguguaugauguuccgaauccucccuucgaccuggaacuuaccgaucagcuggacaaguccgugcagcucucuuggacaccuggcgaugacaacaauagccccaucaccaaguuuaucauugaguacgaagaugcuaugcacaaacccgggcuguggcaccaucagacagaggucuccggaacccaaacgacagcccagcugaaacuuagcccuuaugugaacuacucuuuccggguuauggcggucaauuccaucggcaagagccucccgucugaagccuccgagcaguaucugaccaaggcuagcgagcccgacaaaaacccuacagccguggaagggcugggcucugagcccgacaaucucgugauuaccuggaagccucugaacggauuugaaagcaauggccccgggcuucaguacaagguuuccuggagacaaaaagauggagacgaugaguggaccagcguggucguggcuaacgugucuaaguauaucgucuccggcacaccuacguucguuccguaccugauuaaagugcaggcccucaaugacaugggguuugcccccgaaccugcuguggucaugggacacagcggcgaggaucugcccaugguggcgccugggaacguucgcgugaaugucgugaacuccacccuggccgagguucauugggaccccgugccgcuuaagucuauccggggccaccuccagggauacagaaucuauuacuggaaaacacaaagcuccucuaagcgcaaucggagacauauugaaaagaagauccugaccuuccagggcagcaagacacacgggaugcugccuggacucgagcccuuuucccacuauacccugaacguccgggugguuaacggcaaaggggaaggacccgcuucuccugaucgcguguucaauacgcccgagggcgucccuagcgccccguccagccuuaagauugugaaccccacacuggacucucucacccuggaaugggauccucccucccauccuaaugggauccugaccgaguacacacuuaaauaucagcccauuaacagcacccacgagcucggcccgcugguggaccugaagaucccugccaauaaaacaagauggacgcucaagaaccugaauuuuucuacccgguacaaguucuauuuuuacgcucagacauccgccggaagcggcucucaaaucaccgaagaggcggucacaaccguugaugaagcugggauucuucccccugacgugggagccggcaaagugcaggccgucaaccccagaaucuccaaucugacggcugccgcggcugagaccuacgccaacauuagcugggaguaugaagggccugagcaugugaauuucuacguugaauauggaguggccggcuccaaggaggaauggcgcaaagagaucgucaacgggagccggucuuucuuuggccucaagggacugaugcccggcacagcuuacaaagugagaguuggggccgugggagauagcggcuucgucuccucugaggacguguuugaaaccgggccggcuauggccagccgccaggucgacauugcgacacagggaugguucaucggccugaugugcgccguggcccuucugauucucauccugcucaucguuuguuuuauuagacggaauaagggcgggaaguauccugugaaagagaaggaagaugcccacgcugaccccgagauccaacccaugaaagaagaugacggaaccuucggcgaguacuccgaugccgaggaccacaagccucugaaaaaggggucucgcacaccgagcgauagaaccgucaagaaagaagacuccgaugacucucuuguggauuauggagagggcguuaacgggcaguuuaaugaagacggcagcuucauuggacaguacuccggcaagaaagagaaggaacccgccgaggggaacgagagcucugaagcuccuucccccgugaacgcgaugaauagcuuugucuga

SEQ ID NO: 3391 - RNA, 1305 nt, Artificial Sequence
  AAB51320 variant
augagcaucgagaagauuugggccagagaaauccuggacucccggggcaaccccaccguggaggucgaucucuacacagcuaaagggcuguuccgcgccgcgguuccuucuggagcuagcacgggcauuuaugaagcccuugagcugagagacggggauaagcagcgguaccucggaaaaggcgugcugaaggccguggaccacaucaauuccaccauugcuccggcccuuaucucuagcgggcuguccgucguggaacaagagaaacucgauaaccugaugcuggagcucgacggaacagaaaauaagucuaaguuuggcgcuaacgccauccugggcguuagccuugcggugugcaaagccggggcugccgagcgcgaacugccccucuauagacauauugcucagcuggccggaaauuccgaucuuauccugccuguccccgcguucaacgugauuaauggcgggagccacgccggaaacaagcucgcuaugcaggaguuuaugauccugccuguuggcgccgagucuuuccgggacgcuaugcgccugggggccgaaguguaccauacccucaaaggagucauuaaggauaaauauggcaaggacgccacaaaugugggcgaugagggaggauuugcucccaacauccuggaaaauuccgaggcgcuugaacuggugaaggaggccauugacaaagcuggcuacaccgagaagaucgucaucgggauggauguugccgccagcgaguucuauagagacggaaaauacgaccucgauuuuaagucuccuacagacccgucccgguacauuaccggcgaucagcugggggcucuuuaucaagacuucgugcgcgauuaccccguggucagcaucgaggacccuuuugaucaggacgauugggccgcguggucuaaauucacggcuaacguggggauucagaucguuggcgacgaucugaccgugacaaaucccaagagaauugaacgggccgucgaggaaaaagccuguaacugccuccugcugaaggugaaucagaucggcuccguuaccgaggcuauccaagccuguaagcucgcucaggagaacggguggggagugauggucagccaccgcuccggcgaaacagaggacaccuuuauugccgaccugguggucgggcuuugcacgggacagaucaaaacaggcgcgccuuguagaucugaacggcuggccaaguauaaccagcucaugcgcauugaggaagaacugggggaugaggcuagauucgccggccauaauuuucggaaccccagcgugcuuuga

SEQ ID NO: 3392 - RNA, 1395 nt, Artificial Sequence
  AAH08489 variant
auggagacccugagcuuccccagauacaacguggccgaaaucgucauucacauccggaauaagauucucacaggcgcugacgggaaaaaccugacgaagaaugaucuuuauccuaacccgaaacccgagguucugcauaugaucuacaugcgcgcccuccagauuguguauggaaucagacuggaacacuuuuacaugaugccugucaauuccgaggugauguauccccaucuuauggaaggcuuccugccuuuuucuaaccucgugacccaccuggacagcuuccugcccaucugccggguuaaugauuuugagacagcggacauucucuguccuaaggcuaaacgcaccuccagauuccugucugggaucauuaacuuuauccauuuccgggaggccugccgcgaaacauacauggaguuucuuuggcaauauaagagcuccgccgauaagaugcagcagcugaaugcugcccaccaggaagcucucaugaaacuggagagacuugacucugugccggucgaggaacaagaggaguucaagcagcugagcgauggcauucaggaacuccagcaaucccugaaccaggacuuucaccagaaaaccaucgugcugcaggaaggaaauagccaaaagaaaucuaacauuuccgagaagacaaagcggcucaaugagcugaaacuuagcguugugucucugaaggaaauccaggagucccucaaaaccaagaucgucgauagccccgaaaaacugaagaacuacaaagagaagaugaaggacacggugcagaaacuuaagaaugcccgccaagaaguggucgagaaauacgagauuuauggggauucuguugacugucugccuuccugccagcucgaagugcagcuguaccagaagaaaauccaagaucugagcgacaacagagagaagcucgcguccauucugaaggaaucucuuaaccuggaggaccagaucgaaagcgaugaguccgagcucaaaaagcugaaaaccgaagagaauagcuucaagcggcuuaugauugugaaaaaggaaaagcuggccacagcucaguuuaaaaucaacaagaaacaugaggacgucaagcaguauaaacgcaccgugaucgaggauuguaauaagguucaagaaaagagaggagccguguacgagcgggucacaaccauuaaccaggaaauccagaaaauuaagcucggcauccagcaacugaaagacgcugccgagcgcgaaaagcugaaaucucaggagauuuuccucaaucugaagacggcgcuugagaaauaucacgauggcaucgaaaaggccgcugaggacuccuacgccaagaucgaugagaaaacagcugaacugaagagaaaaauguucaagaugagcaccuga

SEQ ID NO: 3393 - RNA, 543 nt, Artificial Sequence
  AAB49693 variant
augcaggccgagggcagagggaccggaggcagcacaggggacgcugauggacccggcgggccuggaaucccggacggccccggcgggaacgccggaggcccuggggaagcgggagcuacgggcgggcggggaccccgcggcgccggcgccgcuagagccuccgggccuggaggcggggcuccccggggaccucacggcggggccgcgucuggacugaauggcugcugucgcugcggcgccagagggccggagagccggcuccuggaguucuaccuugcuaugcccuuugccaccccuauggaagcugaacuggcccgcagaucccucgcgcaagaugcucccccucugcccgugccgggaguccuucugaaggaguucacaguuucuggcaacauucucaccauccggcugacagccgccgaccaucgccagcugcagcucagcauuuccucuugucugcagcaacuuagccugcucauguggaucacccagugcuuucugccuguguuccuugcucagcccccuuccgggcagagacgguga

SEQ ID NO: 3394 - RNA, 1215 nt, Artificial Sequence
  CCDS14134.2 variant
auggccagccccagacugggcaccuucugcuguccuacacgggacgcugccacgcagcucgugcuguccuuucaaccgcgcgcguuccacgcucuuugccuggggucuggaggccucagacuggcccuugggcugcuccagcugcugcccggacggcgcccugccggccccgggagcccugcuaccucucccccugccuccgucagaauccuccgggcugccgcggccugugaucugcuuggaugccugggcaugguuauucgcagcacaguguggcucggcuuuccgaacuucguggacuccgucucugauaugaaucauaccgagaucuggcccgcugccuuuuguguggggagcgcuauguggauucagcugcuuuacuccgccugcuucugguggcuguuuuguuaugcgguugacgccuaccucgugaucagacggagcgcuggacugucuacaauucugcucuaucacaucauggccuggggccuggcuacccuucugugcgucgaaggggccgccaugcucuacuauccuuccgugagccgcugugagagaggacuggaucaugcuaucccccacuacguuacaauguaucuuccucugcuccuggugcuggucgcgaaccccauucucuuccagaagaccgugacggccguggcuucucugcuuaaaggccggcaagggaucuacaccgaaaaugagcgcagaaugggagccgucauuaagauccgguuuuucaaaauuaugcugguucucaucauuugcuggcuguccaacaucaucaaugaaagccuucuguuuuaccucgagaugcagacagacauuaacggcggcucucugaagccggugcgcaccgccgcuaaaacaaccugguucaucauggggauucugaauccugcccagggauuucuccugucccuugcguucuauggcuggacgggguguagccugggauuccagucccccagaaaggagauccaaugggaaucucucacaaccagcgcugccgagggcgcccauccuagcccccugaugccccacgaaaacccugcuuccgggaaggugucucaggucggaggccagacauccgaugaggcccugagcaugcuuucugagggcagcgacgcuuccaccauugaaauccacaccgccucugagagcugcaauaaaaacgaaggggauccggcgcuccccacacauggagaccuguga

SEQ ID NO: 3395 - RNA, 3141 nt, Artificial Sequence
  AAH38180 variant
auggccagcuccgugggcaacgucgcugacucuaccgagcccacaaagagaaugcugagcuuccaggggcucgccgaacuggcgcaccgggaguaccaagcuggagauuuugaagccgccgagcgccauugcaugcagcuuuggagacaggaaccugacaauacgggcguucugcuccugcuuuccucuauccacuuccagugucggcgccuggauagaagcgcucauuuuuccacccucgccauuaaacaaaacccgcugcuggcugaggccuauucuaaucucgggaacguguacaaggagcggggacagcugcaggaagcgaucgagcacuaucgccaugcccuuagacugaaacccgacuucauugauggcuacaucaaucucgcugccgcucugguggccgcgggggacauggaaggagccguccaggcuuaugugagcgcccuucaauacaacccugaucuguauugcguucgguccgaccucggcaaucugcugaaggcucucggccgccuggaggaggccaaagccuguuaccuuaaggcuauugaaacacagcccaacuuugcgguggccuggagcaaucuggggugcgucuucaacgcucagggagagaucuggcucgccauccaccacuuugaaaaggccgugacccuggauccuaauuuccuugacgcuuacauuaaccugggcaauguucucaaagaggccagaaucuuugaucgggcgguggcugccuaucugcgcgcccugucucucucccccaaccaugcugucgugcacgggaaucuggccuguguguacuaugaacagggacuuauugaccuggcuaucgauacauacagacgggccauugagcuccaaccucauuucccggacgcguauugcaaccuggccaacgcucuuaaggagaaaggcagcgucgccgaagcugaggacuguuacaauaccgcccugcgccucugccccacacacgcggauucucugaacaaucuggccaacaucaagagagaacaggggaauauugaggaagcuguucggcucuauagaaaagcccuggagguguuuccugaguucgcugccgcccacuccaaccuugcuagcgugcugcagcaacagggaaagcuccaggaagcgcugaugcauuacaaggaggccauccgcaucucucccaccuuugcugacgccuacuccaauaugggcaacacgcugaaagaaaugcaggauguccaaggcgcccuucaguguuauacccgggcuauucagaucaauccugccuucgcggacgcucacagcaaccucgccuccauucauaaggauucugggaauauccccgaggccauugcuagcuacagaacagcccugaaacugaagccggacuucccugaugcguauugcaaccucgcucacugucugcagaucgugugcgacuggaccgauuacgacgaacgcaugaaaaagcugguuuccaucguggccgaucaacuugagaaaaaucggcuccccagcguccauccucaccacucuaugcuguauccccugucccauggauuuagaaaggccauugcugagcgccacggcaaccuuugccucgacaagaucaaugugcugcauaaacccccuuacgaacacccgaaggaccugaaacucagcgaugggcggcugagaguuggauaugugucuagcgacuucggcaaccaccccacaucccaucuuaugcagucuauuccugggaugcacaaccccgauaaguuugaggucuucuguuacgcccugagcccugacgauggaaccaauuuucgcgugaaagucauggcugaagccaaccauuucaucgaccucucccagauucccugcaauggcaaggcggccgaucggauccaccaggacggcauccauauucuggugaacaugaauggguacacgaagggagcuagaaacgagcuguuugcccuucgcccggcuccuauccaagccauguggcucggcuaucccgggacaagcggagcccuguucauggauuacauuaucaccgaccaggagacaucuccugcugaaguugcggagcaguauuccgaaaaacuggccuacaugccccacaccuuuuucauuggcgaucacgcuaauauguuuccucaucucaagaaaaaggccgugaucgacuucaaaagcaacgggcacauuuaugauaaucggaucguccugaacggcaucgaccuuaaggccuuucuggacucucuccccgaugugaagauuguuaaaaugaaguguccggacggaggcgauaaugcugacuccagcaacaccgcccugaauaugccugugauccccaugaacacaauugcggaggcugucaucgaaaugauuaauagagggcagauccaaaucacgauuaacggauucuccaucucuaacggccuggccaccacacagauuaauaacaaagccgcuaccggggaggaggugccccggacaaucauugugaccacgcgcagccaguacggacuuccugaagaugccaucguuuauugcaauuucaaccaacucuacaagaucgacccguccacacugcagaugugggcgaauauucugaaaagaguccccaacucugugcucuggcugcuucgguuuccugcugugggcgagcccaauauccagcaguacgcccaaaacauggggcugccucagaauagaauuaucuucagccccgucgccccuaaggaggaacaugugcgccggggccagcucgcugauguuugucuggacacaccccugugcaacggacacaccaccggcauggaugugcuuugggccgggaccccgauggucacaaugccuggagaaacgcuggcuuccagaguggccgcgagccagcucaccugucugggcugccucgagcugauugccaagaaucgccaagaguaugaagacaucgcuguuaaacuugggacagaucuggaguaccucaagaaagugagaggaaaggucuggaaacagcggaucucuagcccccuguuuaacaccaagcaguauacaauggaacuggagcgccuuuaccugcagaugugggaacauuaugccgcuggcaauaaaccugaccacaugauuaagcccguggagguuaccgaguccgccuga

SEQ ID NO: 3396 - RNA, 441 nt, Artificial Sequence
  BAG57972 variant
auggccgcugagacccugcucagcucccugcuuggccugcuccugcuugggcugcuccugcccgccucucugacaggaggcguggggagccucaaccuggaggaacuuuccgaaaugagauacggaaucgagauucugccucucccggucaugggcgggcagucucaaagcuccgacguugugaucgugucuagcaaguauaaacagcgguacgaaugccgccugcccgucggagcgauucacuuccagagagagcgggaggaagagacgccugcuuaucagggccccggcaucccugaacuucugucccccaugcgcgaugccccuugucuccugaagaccaaagacugguggacauacgaguuuugcuaugggagacauauucaacaguaccacauggaggauagcgaaaucaagggacugcaggccgcuucuuccuga

SEQ ID NO: 3397 - RNA, 1221 nt, Artificial Sequence
  BAG65333 variant
auggccgcugagacccugcucagcucccugcuuggccugcuccugcuugggcugcuccugcccgccucucugacaggaggcguggggagccucaaccuggaagaacuuuccgaaaugagauacggaaucgagauucugccucucccggucaugggcgggcagucucaaagcuccgacguugugaucgugucuagcaaguauaaacagcgguacgaaugccgccugcccgcgggagcuauucacuuccagagagagcgggaggaagagacgccugccuaucagggccccggcaucccugaacuucugucccccaugcgcgaugccccuugucuccugaagaccaaagacugguggacauacgaguuuugcuaugggagacauauucaacaguaccacauggaggauagcgcuucuggagccccgaaugacuuccagaacaauguccaggugaagguuauccggucccccgcugaucugauccgcuuuauugaggagcucaaaggcgggaccaagaagggaaaaccuaacaucggccaagaacagcccguggacgaugccgcggaggucccucagagagaacccgagaaggagcgcggggacccggaacggcagagagagauggaagaggaagaggaugaggacgaagaugaggacgaagaugaggacgaacggcaacugcuuggagaguucgagaaagaacuggagggcauucuccugccuagcgaccgcgauagacuucggucugaagugaaggccggcauggagcgcgagcuggaaaauaucauucaggagacagaaaaagagcucgaccccgaugggcugaagaaggaauccgagagagaccgggcuaugcuggcccucaccagcacacugaacaaacuuaucaagagacuggaggaaaaacagucuccugagcucguuaagaaacauaagaaaaagcgcgugguccccaagaaacccccuccgagcccccaaccuaccggaaagauugaaaucaaaaucgugcggcccugggcugagggcacggaagagggggccagauggcugaccgaugaggacacacgcaaucuuaaggaaaucuuuuucaacauucuggugccuggagcggaggaagcccagaaagagcggcagagacagaaggaacucgaguccaauuaucgccgggucuggggcucccccgggggagagggcaccggcgaucuggacgaauuugauuucuga

SEQ ID NO: 3398 - RNA, 2223 nt, Artificial Sequence
  BAH13933 variant
auggccguggagacccugcucagcucccugcuuggccugcuccugcuugggcugcuccugcccgcuucucugacaggaggcgucgggagccucaaccuggaagaacuuuccgaaaugagauacggaaucgagauucugccucucccgguuaugggcgggcagucucaaagcuccgacguggugaucgucucuagcaaguauaaacagcgguacgaaugccgccugcccgccggagcgauucacuuccagagagagcgggaggaagagacgccugcuuaucagggccccggcaucccugaacuucugucccccaugcgcgaugccccuugucuccugaagaccaaagacugguggacauacgaguuuugcuaugggagacauauucaacaguaccacauggaggauagcgaaaucaagggagaggugcuguaucucggcuacuaccagucugccuucgacugggaugacgaaaccgcuaaagccuccaagcagcaucggcugaagcgcuaucacagccaaacauacgggaauggaucuaaaugugaucuuaacggcagaccgcgggaggcugaaguucgcuuucugugcgacgagggggccggaaucuccggcgauuauauugacagaguggaugagccccucagcuguucuuacguccugaccauccggacaccucgccuuugcccccauccucugcucagacccccgccuuccgcggcuccccaggccauucugugucacccuagccugcagcccgaagaguauauggccuacgugcagcggcaagcugacuccaagcaguauggcgauaaaaucauugaggagcuccaggaccuggggccccaaguuuggucugaaaccaagagcggaguggccccucagaaaauggcgggccgcacgcuuuuccaccuguuuagagagauccauuuccacuuuuucccgucccccgaccucaccguccugacagauugguggggagggggcgggguggagaaguaccauggaccuagcucucuuggcgaccggggcggggaaggaacccccuccuaccugcucccuagcgugucuccccugcugagcgaucagucccucccgguccugugcacacuuggcgccucuccuaccaaggacgauagcaaagacuccgauuuuuggaagaugcugaaugagcccgaagaccaggcuccugggggagaggaaguucccgccgaggagcaagauccuagccccgaagcugccgacucugccuccggcgcuccgaacgauuuccagaauaacguccaggugaaagugauuagaagcccugcggaccucauccgcuuuaucgaggaacugaaagggggcacgaagaagggaaaacccaauauuggccaggagcaacccguggacgaugccgcugagguuccucagcgggaaccggagaaggaaagaggggaccccgagcgccagcgggaaauggaggaggaagaggaugaagacgaggaugaagacgaggaugaggacgaaagacagcugcuuggagaguucgaaaaggagcucgaaggcauccugcugccuucugaucgcgaccggcucagauccgaggugaaagccgggauggagcgcgaacuggagaacauuauccaagaaacagagaaggagcuugaucccgacggacugaaaaaggaaagcgagcgggauagagccaugcucgcucugaccuccacacugaauaaacuuauuaagcgccucgaagagaagcagucuccugaacuggucaaaaagcacaaaaagaaacgggugguucccaagaagccucccccgagcccucagcccaccgaggaggacccugaacacagagugcggguccgcgugaccaaacugagacucggcgggcccaaccaggaccugacaguccuugagaugaagcgggaaaauccgcaacugaaacagaucgagggccucgugaaggaacugcuggagagagagggacuuacggccgcgggcaaaaucgaaauuaagaucguucgcccuugggcugaggggaccgaagagggagcccgguggcucacagaugaagacaccagaaaccugaaggagauuuucuucaauauccuggugcccggcgccgaggaagcucagaaagagcgccaaagacagaaggaacucgaguccaacuaucggcgcgucugggggucuccuggaggcgaggggacaggcgaucuggacgaauuugauuuuuga

SEQ ID NO: 3399 - RNA, 2004 nt, Artificial Sequence
  AAB06495 variant
auggccgcugagacccugcucagcucccugcuuggccugcuccugcuugggcugcuccugcccgccucucugacaggaggcguggggagccucaaccuggaagaacuuuccgaaaugagauacggaaucgagauucugccucucccggucaugggcgggcagucucaaagcuccgacguugugaucgugucuagcaaguauaaacagcgguacgaaugccgccugcccgcgggagcuauucacuuccagagagagcgggaggaagagacgccugccuaucagggccccggcaucccugaacuucugucccccaugcgcgaugccccuugucuccugaagaccaaagacugguggacauacgaguuuugcuaugggagacauauucaacaguaccacauggaggauagcgaaaucaagggagagguccuguaucucggcuacuaccagucugcuuucgacugggaugacgaaaccgccaaggcuuccaaacagcaucggcugaagcgcuaucacagccaaacauacgggaauggaucuaaaugugaucuuaacggcagaccgcgggaggccgaagugcgcuuucugugcgacgagggggcgggaaucuccggcgauuauauugacagaguugaugagccccucagcuguucuuacgugcugaccauccggacaccucgccuuugcccccauccucugcucagacccccgccuuccgccgcuccccaggccauucugugucacccuagccugcagcccgaagaguauauggcuuacguccagcggcaagccgacuccaagcaguauggcgauaaaaucauugaagaacuccaggaccuggggccccaaguguggucugaaaccaagagcggaguugcgccucagaaaauggccggcgcuuccccgacgaaggacgauagcaaggacucugauuucuggaaaaugcuuaaugagcccgaggaccaggccccugggggagaagaggugcccgcugaggagcaggauccuucccccgaagccgccgacagcgcuucuggcgcgccgaacgauuuucaaaauaacguccaggugaaggugauccgcagcccugccgaccugauuagauucaucgaggagcucaaagggggaaccaagaaaggcaagcccaauaucggccaggaacagccugucgaugacgcugccgagguuccccaacgggaaccugagaaagagagaggggaucccgaacgccagcgggagauggaagaggaagaggacgaggacgaagaugaggacgaagaugaggacgaaagacagcugcuuggagaguuugagaaggaacuggagggcauucuccugccguccgaucgcgaccggcugagaucugaagugaaggccgggauggagcgcgaacucgagaacaucauucaggagacagaaaaagagcuggauccugacggacuuaagaaagaaagcgagcgggauagagcuaugcuggcccucaccuccacacugaauaagcugaucaaacgccuugaggaaaagcaaagccccgagcucgugaagaaacacaagaaaaagcgggucgugcccaaaaagccuccgcccucuccucagcccaccgaagaggacccugaacauagaguucgcgugcgggucacgaagcugagacugggcgggcccaaccaggaucucacagugcuggagaugaaacgggagaauccucagcuuaagcaaauugaaggccugguuaaagagcuccuggaacgcgagggacugaccgcggcuggcaagaucgaaaucaaaauugugagacccugggccgaggggacagaggaaggagcccgguggcuuaccgacgaggauaccagaaaccucaaggaaaucuucuuuaauauucuggucccgggcgcugaggaagcccagaaggagcgccagcggcaaaaagagcuggaauccaacuacagacgcgugugggggagcccuggaggcgaggggacaggcgaccucgacgaguucgauuuuuga

SEQ ID NO: 3400 - RNA, 303 nt, Artificial Sequence
  AAI13433 variant
augagagcccugacccuccuggcccuucuggcucucgcggcucugugcaucgccggccaggccggggcuaagcccagcggagccgaguccucuaaaggcgcugccuucgugagcaagcaagaaggguccgaggucguuaaacggccucgcagauaccuuuaucaguggcugggagcgccggugcccuacccugacccccucgaaccucggcgcgaggugugugaacugaaccccgauugcgacgagcuggccgaucacauuggcuuucaggaggcuuauagacgguucuacgggccugucuga

SEQ ID NO: 3401 - RNA, 945 nt, Artificial Sequence
  EAX06008 variant
augagaaucgccgugauuugcuucugucugcucggcauuaccugcgcuauccccgucaagcaggccgacagcggguccucugaggaaaaacaacuguacaacaaguauccugaugcgguugcuacauggcuuaauccggaccccagccagaaacagaaccugcucgccccucagaaugccguguccucugaggaaacgaacgauuuuaagcaagagacccugcccagcaaauccaaugaaucucacgaccauauggaugacauggaugacgaggaugacgaugaccacguggauagccaggacuccaucgacagcaacgauucugacgaugucgacgauacagacgauucccaucagagcgacgagucucaccauuccgaugaaagcgacgagcuugugaccgauuucccuacagaccugcccgcuaccgaaguuuuuacaccuguggucccgaccguggacacguacgauggacggggcgacucuguuguguaugggcuccgcuccaagagcaagaaauucagacggcccgauauucaguacccugacgccaccgaugaggacaucacaucccacauggagucugaggaacugaauggagcuuauaaggccauccccgucgcgcaagaucugaacgccccuagcgacugggauucccgcggcaaagacagcuacgaaaccucucagcucgaugaccaguccgcugagacacacagccauaagcagucuagacuguauaaacggaaggccaaugaugaaagcaacgagcacuccgacgugauugacucucaagagcuuagcaaggugucccgcgaauuucauagccacgaguuccacucucaugaagauaugcuggucguugaccccaaauccaaggaggaagauaaacaccucaaguuuagaaucagccaugagcuggacucugcuuccagcgaggugaauuga

SEQ ID NO: 3402 - RNA, 903 nt, Artificial Sequence
  EAX06009 variant
augagaaucgccgugauuugcuucugucugcucggcauuaccugcgcuauccccgucaagcaggccgacagcggguccucugaggaaaaacaacuguacaacaaguauccugaugcgguugcuacauggcuuaauccggaccccagccagaaacagaaccugcucgccccucagacgcugcccuccaagucuaaugagagccacgaucauauggacgauauggacgaugaagacgaugacgaucacguggacucccaagauucuaucgacagcaacgacuccgaugacguggaugacaccgaugacagccaucagucugaugagucccaccauagcgacgaaucugaugagcuugucacagacuuuccuaccgaucugcccgccacagagguguucaccccuguugugccgacagucgacaccuacgacggacggggcgauuccgugguuuaugggcuccgcagcaaaucuaagaaguuuagacggcccgacauucaguacccugaugcuacggacgaagauaucaccucccacauggagagcgaagaacugaauggagccuauaaagcuauccccguggcccaggaccugaacgcgccuuccgauugggacucucgcggcaaggauagcuacgagacaucccaacucgacgaucagagcgccgaaacccacucucauaaacaguccagacuguauaagcggaaagcuaaugacgagagcaacgaacacucugaugucauugacagccaggagcuuuccaaggugucucgcgaguuccauagccacgaguuucacucccaugaggacaugcugguggucgaucccaagagcaaagaagaggacaagcaccucaaauucagaaucucucaugaacuggauuccgccagcucugagguuaauuga

SEQ ID NO: 3403 - RNA, 864 nt, Artificial Sequence
  EAX06010 variant
augagaaucgccgugauuugcuucugucugcucggcauuaccugcgcuauccccgucaagcaggccgacagcggguccucugaggaaaaacaaaacgcgguuagcuccgaggaaacaaaugauuuuaagcaggagacgcugccuucuaaaagcaacgaaucccacgaccauauggaugacauggaugacgaggaugacgaugaccacguggauucucaggacagcaucgauuccaaugacagcgacgauguggacgauaccgacgauucucaucaguccgacgagagccaccauucugaugaauccgacgagcuugucacagauuucccgaccgaccugcccgcuacagaaguguuuaccccuguugugcccacagucgauaccuacgacggacggggcgacagcgugguuuaugggcuccgcucuaaguccaaaaaguucagacggccugauauucaauaccccgacgccacggaugaggacaucaccagccacauggaguccgaggaacugaacggagccuauaaggcuaucccuguggcccaggaucuuaaugcuccgucugacugggauagccgcggcaaagacuccuacgaaacaagccagcuggaugaccagucugccgagacccacucccauaagcaaagcagacucuauaaacggaaggcgaacgaugaaucuaaugagcacagcgacgucauugauucccaggagcugucuaaagugagccgcgaauuucauucccacgaguuccacagccaugaagacaugcugguggucgaccccaagucuaaggaggaagauaaacaccucaaguuuagaaucucccaugagcuggacagcgccucuuccgagguuaacuga

SEQ ID NO: 3404 - RNA, 984 nt, Artificial Sequence
  BAH12087 variant
augggcaucgugcccagaagccuggacaagaaagcccaccggguccaguuccaacucaaccgcauuaaggcuaaaaucgagcugccuugggggucccuucagcuggauugccucaugaagacccugaaagaacuuuacaauaaguauccggacgccguugcgacauggcugaaccccgauccuucucagaagcagaaucuccuggcuccccaaaacgccgugagcuccgaggaaacgaaugacuuuaaacaggagacccugccuucuaagagcaacgaaucccaugaucacauggacgauauggacgaugaggacgaugacgaucauguggacucucaggacagcauugauuccaaugacagcgaugacgucgaugacacagaugacucucaccaguccgaugagagccaucacucugacgaauccgaugagcucgugaccgacuuccccacagaccugccugccaccgaaguuuuuacaccggugguccccaccguggauacguacgacggaagaggcgauagcguuguguaugggcuucggucuaaauccaagaaauuccgcagaccugacauccaauaccccgaugcuaccgacgaggauauuacaagccacauggaguccgaggaacugaacggagccuauaaggcuaucccugucgcccaggaccucaaugcgcccucugauugggacagccggggcaaggauuccuacgaaaccagccagcuggacgaucagucugccgagacacauucccacaaacaaagccgccuuuauaagagaaaagcuaacgacgaaucuaaugagcauagcgacgugaucgauucccaggagcugucuaaggugagccgggaauuucacucccacgaguuccauagccacgaagacaugcucgucguugauccgaaaucuaaggaggaagacaaacaucugaaguuucgcauuucccacgagcuggauagcgccucuuccgaggugaacuga

SEQ ID NO: 3405 - RNA, 879 nt, Artificial Sequence
  AEA49030 variant
augagaaucgccgugauuugcuucugucugcucggcauuaccugcgcuauccccgucaagcaggccgacagcggguccucugaggaaaaacaacuguacaacaaguauccugaugcgguugcuacauggcuuaauccggaccccagccagaaacagaaccugcucgccccucagaaugccguguccucugaggaaacgaacgauuuuaagcaagagacccugcccagcaaauccaaugaaucucacgaccauauggaugacauggaugacgaggaugacgauagccaccaguccgacgagagccaucacucugaugaauccgacgagcuugugacagacuucccuaccgaucugcccgcuacagaagucuuuaccccugugguuccgacaguggacaccuacgauggacggggcgacagcgucguguaugggcuccgcucuaaguccaagaaauucagacggcccgauauccaguacccugacgccacggaugaggacauuaccagccauauggagucugaggaacugaacggagcuuauaaggccauccccguugcgcaggaucugaaugccccuuccgacugggauagccgcggcaaagacuccuacgaaacaucucaacucgacgaucagagcgcugagacccacucccacaagcagagcagacuguauaaacggaaggccaacgacgaaucuaaugagcauuccgaugugaucgacagccaggagcuuucuaaggucagccgcgaauuucacucccaugaguuccacucucacgaagauaugcuggugguggaccccaaaagcaaggaggaagauaaacaucucaaguuuagaauuucccacgagcuggacagcgcuucuuccgaggucaacuga

SEQ ID NO: 3406 - RNA, 945 nt, Artificial Sequence; identical to SEQ ID NO: 3401
  AAA86886 variant

SEQ ID NO: 3407 - RNA, 1182 nt, Artificial Sequence
  AAA59988 variant
auggaggaaccccagagcgacccuuccguggagccgccccugucucaagaaaccuucagcgaucucuggaagcugcuuccugagaacaauguccugucuccccucccuucccaggccauggacgaucugaugcuuagccccgacgauaucgaacagugguuuacagaggacccuggcccggaugaggcucccagaaugccugaagccgcgcccccuguugcucccgccccggccgcuccuacgcccgccgcuccugcccccgcgcccuccuggccucugucuagcuccgugccgagccagaaaaccuaccaagggucuuauggauuccggcucggcuuucugcacuccgggacagccaagagcgugaccugcacauacucucccgcucugaacaaaauguucugucagcucgccaagaccugcccuguccagcuguggguggacuccacacccccucccggaacccgcguuagagcuauggccauuuauaaacagagccaacauaugacggaggugguccggcgcuguccgcaccaugaaagaugcucugauuccgacggccuugcgccuccccagcaccugauccggguggaggggaaucuccgcguugaguaccuggaugacagaaacaccuuucggcauagcguggucgugccuuaugaacccccugaggugggauccgauuguacaaccauucacuacaauuauaugugcaacucuagcuguaugggcggcaugaaucgcagacccauccuuacaauuaucacccuggaagacuccagcgggaaccuccugggacgcaauucuuucgagguccggguuugcgccuguccgggcagagaccggcgcacggaagaggagaaccugagaaagaagggggaaccucaccaugagcucccucccggauccacaaaacgggcucugcccaauaacaccagcucuagcccgcagcccaagaaaaagccucuugauggcgaauacuuuacacugcagaucagagggcgcgagcgguucgaaauguuuagagagcucaaugaggcccuggaacuuaaagacgcucaagccggaaaggagcccggcggcucccgcgcccacucuagccaucugaaguccaaaaaggggcagagcaccucucggcacaaaaagcucauguucaaaaccgaaggaccugauuccgacuga

SEQ ID NO: 3408 - RNA, 309 nt, Artificial Sequence
  AAF88037 variant
augagcgccagagugcggucccgcucuagaggccgcggggacggacaggaggcucccgaugucguugccuucguggcgccuggcgaaagccaacaggaggaaccgcccaccgacaaccaggauaucgagccugggcaggaacgggagggaacacccccuauugaggaaagaaagguggagggcgacugccaagaaauggaucuggagaaaacgcgguccgagcgcggggacggaucugaugucaaggagaaaacacccccuaauccgaagcacgcuaaaaccaaggaagccggcgacggccagcccuga

SEQ ID NO: 3409 - RNA, 1209 nt, Artificial Sequence
  AAA60003 variant
augcagaugagccccgcccugaccugccucgugcugggccuugcucuggucuucggggagggauccgccguucaccauccuccgucuuacguggcgcaccucgcuagcgacuuuggcgugagagucuuccaacagguggcccaggccuccaaggaucggaacguuguguuuucucccuauggggucgcuagcgugcuggccaugcuucagcugacaacgggaggcgaaacccaacagcagauccaggcugccaugggguucaaaauugacgauaagggaauggcgccugcccuccgccaucuguacaaagagcugaugggccccuggaauaaggacgaaaucuccacaaccgaugcuauuuuuguucaaagagaccucaaacuggugcagggcuucaugccucacuuuuuccggcuuuuucgcucuacagucaaacagguggauuucagcgagguggaaagagcccgguuuaucauuaacgacugggucaagacccauacaaaggggaugaucuccaaucugcucggaaagggcgcuguugaucagcugacccgccuugugcuggugaacgcccucuauuucaaugggcaauggaaaacgcccuuuccugacagcucuacccacagacggcuguuccacaaguccgauggaagcacagucucugugccgaugauggcgcagaccaacaaauucaauuacacagaguuuaccacgcccgacggccauuauuacgauauccuggagcucccuuaucacggggacacacuguccauguucauugccgcucccuacgaaaaggagguuccucuuagcgcccugaccaacauccucucugcucagcugauuucccauuggaagggaaauaugacacgccuucccagacugcucgugcugccgaaauuuagccuggaaaccgaggucgaccuccggaagccucuggagaaccuuggcaugaccgauauguuccgccaauuucaggccgacuucacaucccugucugaucaggaaccccuccacguggcccaggcucugcaaaaaguuaagaucgaggugaaugaaagcggcacggucgcguccagcucuaccgccgugauugucuccgcuagaauggccccugaggaaaucauuauggaccggcccuuucuuuucgugguucgccacaaccccacagggaccgugcuguuuaugggacaggucauggagccuuga

SEQ ID NO: 3410 - RNA, 1248 nt, Artificial Sequence
  AAA36797 variant
auggaggaccugugcguggccaacacccucuucgcucugaaucuuuuuaagcaccuggccaaagcgagccccacacagaaccucuuccuguccccuuggucuaucagcuccacgauggcuauggucuacaugggcucuagagggagcaccgaagaucaaauggccaagguucuucaguuuaaugaggugggagccaacgcugugacaccgaugacccccgaaaauuucacauccuguggcuuuaugcagcagauucaaaaagggucuuauccugacgccauccugcaggcucaggccgcggauaagauucauagcuccuuccggagccucucuuccgccaucaacgcuagcaccggaaauuaccugcuggagucugucaacaaacucuuuggcgaaaaguccgccagcuuccgcgaggaguauauuagacugugccagaaguacuauucuuccgaaccccaagcuguggacuuucuugagugugccgaagaggcgcggaaaaagaucaauagcuggguuaaaacacagaccaaggggaaaaucccuaaccugcuccccgagggauccguggauggcgacacgcgcaugguccuggugaaugccguuuacuucaagggcaaguggaaaaccccuuuugaaaagaaacuuaacgggcuguauccguucagagucaauucugcucagcggacacccgugcagaugauguaccuccgcgagaagcugaacauuggauacaucgaagaucugaaagcccaaauucucgagcugccuuaugcuggcgacgugagcauguuucuucugcuccccgaugaaaucgccgacguguccaccgggcuggagcuucuggagagcgaaauuacauacgauaagcucaauaaauggaccucuaaggacaagauggccgaggaugaagucgagguuuauaucccucaguucaaacuggaggaacacuacgagcugagauccauucuccggagcaugggaauggaagacgcuuucaacaagggccgcgcgaacuuuucugggaugagcgagagaaaugaccuguuccuuuccgaaguguuucaucaggccaugguggaugucaacgaggaaggaacggaggcugccgccggcacaggcggggugaugaccggacggacaggccacgggggaccccaauucguugcugaccauccguuucuguuccucaucaugcacaaaaucaccaauugcauucuguuuuucggccgcuuuucuagcccuuga

SEQ ID NO: 3411 - RNA, 528 nt, Artificial Sequence
  AAA60020 variant
augcugcccccuauggcccucccgagcguguccuggaugcugcuuucuugccugaugcuccugagccagguccaaggcgaggaaccccagagagagcuuccuuccgcucggauccgcugucccaaggggucuaaagccuacggaagccacugcuaugcgcuguuccucuccccuaagucuuggaccgacgcugaucuggccugucagaaaagacccagcggcaaccugguuuccgugcucagcggggccgaaggaucuuuuguguccagccuggucaagucuauuggcaauuccuacagcuauguguggaucgggcuucaugacccuacacagggaacggagccgaacggcgaaggcugggaguggucuuccagcgauguuaugaauuacuucgcuugggagcggaaccccuccaccauuucuagcccugggcacugcgccucccugagccgcucuacagcuuuucucagauggaaagacuauaauuguaacgugcggcugcccuacgucugcaaguucaccgauuga

SEQ ID NO: 3412 - RNA, 528 nt, Artificial Sequence; identical to SEQ ID NO: 3411
  AAT11159 variant

SEQ ID NO: 3413 - RNA, 381 nt, Artificial Sequence
  AAH39863 variant
auggacaagagccugcuccuggagcuucccauccugcucugcuguuucagagcccuguccggcucucuuagcaugcggaacgaugcugugaaugaaauugucgccguuaaaaacaauuuuccugugaucgagauugugcagugccgcaugugucaucugcaauucccgggggaaaagugcuccagaggacggggcaucuguaccgcgacaacggaggaggcuugcauggucgggcgcauguuuaaaagagacggaaaccccuggcucaccuucaugggcugucugaagaauugcgccgaugugaaagggauucgguggucuguuuaccuggugaacuuucgcuguugcagaagccacgaccucuguaaugaagaucuguga

SEQ ID NO: 3414 - RNA, 1440 nt, Artificial Sequence
  CCDS42826.1 variant
augaccacacuggccggcgcugugcccagaaugaugcggccugggccgggacagaacuacccccgcagcggcuucccucucgaggucuccacgccccuggggcaaggaagaguuaaucagcuuggcgggguguuuaucaacggacggccucugcccaaucacauucgccauaagaucguggaaauggcccaccauggcauuagaccuugcgucaucucucggcagcuccgcgugagccacggcuguguuuccaaaauucugugcagauaucaggagaccgggucuauccggccgggagcgaucggcgggagcaagcccaaacaagugacaaccccugacgucgaaaagaaaauugaggaauacaagcgcgagaaccccggaauguucuccugggagaucagagauaaacuucugaaggacgcugugugugaucggaauacaguuccuucugugagcuccauuagccgcauccucagaucuaaguuuggcaaaggggaagaggaagaggccgaccuggagcggaaggaagccgaggaauccgagaaaaaggcuaagcauagcauugauggaauccugucugaacgcgccuccgcuccccagagcgacgagggcucugauauugacuccgagccggaucucccucugaaaagaaagcagcggagaagccgcaccacauucaccgccgaacagcuugaggaacuggagcgggcguuugaaagaacgcacuaucccgacaucuacacccgcgaggagcucgcccaacgggcuaaacugacagaagccagaguccaggugugguucuccaaccgccgggcuagauggcgcaagcaggccggcgcgaaucagcuuauggccuuuaaccaccugaucccugggggauucccucccaccgcuaugcccacacucccgaccuaucaacugucugagacgagcuaccagcccacauccauuccucaggccgugagcgaucccucuuccaccguccaucggccucaaccccugccgccuagcacaguucaccagucuaccauccccagcaauccugacuccucuagcgcuuauugccuccccuccaccagacauggcuuuagcucuuacacagauuccuucgugccucccagcgggccgucuaacccuaugaaucccacgauuggaaacggccuguccccucaggugauggggcuucugaccaaucacggaggcgucccccaccagccgcaaacagacuacgcccucagcccccugaccggcgggcuugaaccuacaaccacgguguccgccucuuguagccagcgccuggaccauaugaaaucccucgauucucugcccacaagccaguccuauugcccucccaccuacagcaccacaggauauucuauggacccuguuaccggcuaccaguaugggcaauacggacaguccaagcccuggacauuuuga

SEQ ID NO: 3415 - RNA, 1176 nt, Artificial Sequence
  AAA58397 variant
auggaccuggagaagaacuaccccaccccuagaacaagccggacgggccacgggggagugaaucagcucggcggggucuucguuaacggacgcccgcugcccgauguggugagacaacggaucgucgaacuugcccaucagggcgugcgcccuugcgacauuuccagacagcugcggguuucucacgggugugugagcaaaauccucggacgcuauuacgagaccggcuccauuaagcccggcgucaucgggggaucuaaaccuaagguggcuacacccaaaguuguggaaaagauugccgaguauaagagacagaauccuaccauguuugcgugggaaauccgggaucgccugcuugcugagagagucugcgacaacgauacagugccgagcguguccucuaucaaucggauuauccgcaccaaaguccaacagcccccuaaccagcccguuccugccagcucccauagcauugugucuacaggcuccgugacccaggucagcucuguguccacggacagcgccgggucuuccuacagcaucuccggcauucugggaaucaccucucccagcgcugauacaaauaagagaaaacgggacgaggggauucaagaauccccgguuccuaacggacacagccuccccggccgcgauuuccugagaaagcagaugcggggcgaccuguuuacccagcagcaacucgaggugcuggauagagucuucgaacgccagcauuauucugacaucuuuacaaccacggagccuaucaaacccgagcagacaaccgaauacuccgccauggcuagccuugccgggggacuggaugacaugaaggcgaaucucgccucucccacacccgcugacauuggcagcuccgugccggggccccaaucuuauccuaucguuaccggacgggaucuggccagcaccacacuucccggcuacccuccccacgugccgccugcugggcagggauccuacagcgcccccacgcugaccggcauggucccuggcucugaguucuccgggagccccuauucucacccucaguacuccagcuauaacgacuccuggagauuucccaauccgggacuccugggcucuccuuacuauuacagcgcggccgcucgcggggccgcuccucccgccgccgcuacagcguaugaucggcauuga

SEQ ID NO: 3416 - RNA, 873 nt, Artificial Sequence
  AAF25807 variant
augagaaucuucgccguguuuauuuucaugaccuacuggcaccuccucaacgcuuuuacagucacgguucccaaggaccuguaugugguggaguacggcagcaauaugaccaucgaaugcaaauucccugucgagaagcagcuugaucuggccgcgcucauuguguauugggaaauggaggacaaaaacaucauucaauuuguucauggggaagaggaucugaaggugcagcacuccucuuaccggcagcgcgcuagacuucugaaagaccagcucagccugggaaaugccgcccugcaaaucacagaugucaagcuccaggacgcuggcguguaucgguguaugaucuccuacgggggagccgauuauaagcgcauuaccguuaaagugaacgcuccguacaauaagaucaaccagcggauucuggucguggaccccgugacaucugagcaugaacuuaccugccaggccgagggcuacccuaaagcggaagucaucuggacaagcuccgaucaccaaguucugucugggaagaccacgaccacaaauagcaaaagagaggagaagcuguucaacgugaccuccacacugcgcauuaauaccacgacaaacgaaaucuuuuauuguaccuucagacggcuugaccccgaggaaaaucauacagccgagcuggugauuccugaacucccccuggcucacccuccgaacgagcgcacccaccuggucauccucggagccauccugcuuugccugggcguggcucucaccuuuauuuucagacugcggaagggccgcaugauggauguuaaaaagugugggauccaggacacaaauagcaaaaagcagucugauacgcaucuugaggaaaccuga

SEQ ID NO: 3417 - RNA, 867 nt, Artificial Sequence
  AAH74740 variant
augcagaucccccaagccccuuggccgguggucugggcuguucugcagcucggcuggagacccgggugguuccuggacagcccugaucggcccuggaacccucccaccuuuuccccugcccuucugguggugacagagggagacaaugcgacguuuaccugcucuuucagcaacacauccgaaucuuucguccucaauugguaccgcaugagcccguccaaccagaccgauaagcuggcugccuuucccgaggacagaucucagccuggccaagauugucgguuccgcgugacacagcuucccaaugggagagacuuucacaugagcguugugcgggcccgcagaaacgauuccggaaccuaucugugcggcgcuauuagccucgccccuaaagcucagaucaaggaaucucugcgggccgagcugcgcgucacagaaagacgggcggaggugcccaccgcccauccguccccuagcccccgcccugcugggcaguuccaaacgcucguugugggagucgugggcggccugcuugggucucuggugcuccuggucuggguucuugccgugauuuguuccagagcugcccggggaaccaucggcgcgcgcagaacagggcagccccugaaagaggaccccagcgccgugccugucuuuucuguggauuacggagaacucgacuuccaguggcgggagaagaccccggaacccccuguucccugcgugccugagcagacagaguaugcuaccauugucuuucccuccggcauggggacgagcuccccggccagacgcggaucugcugauggcccucggagcgcccaaccccugagaccugaagacggccacuguuccuggccccuguga

SEQ ID NO: 3418 - RNA, 1008 nt, Artificial Sequence
  AAC95296 variant
augggcagcgccucccccgggcugucuagcguguccccuucucaccuccugcuuccgcccgacaccgucagcagaacaggacuggagaaggcugccgcgggcgcuguugggcucgaacggcgcgauugguccccuucucccccugccacgcccgagcagggacugagcgccuucuaccuuuccuauuuugacaugcuguacccugaagauagcucuugggcugccaaagcuccgggcgccuccagcagagaggaacccccugaggagcccgaacaaugcccugugaucgacucucaggcgcccgccgggucccucgaucuggugccgggaggccugacccucgaggaacauagccuggagcagguccagucuauggugguuggcgaggugcuuaaggacauugaaacagcuuguaaacugcucaacaucaccgccgauccuauggacuggucccccagcaauguccaaaaguggcugcuuuggacagagcaccaguaucggcugccucccauggggaaggcuuuccaggaacucgccggaaaggagcugugcgcgauguccgaggaacaguuucgccaaagaucuccccugggcggggaugugcuccaugcccaccuggacauuuggaaaagcgcugccuggaugaaagagcggaccuccccuggagcuauccauuacugugccagcacaucugaagaguccuggaccgauagcgaaguugacucuagcugcuccggccagccgauucaccuuuggcaguuccugaaggagcuccugcuuaaaccccacucuuaugggcgcuuuaucagauggcugaacaaggaaaaaggaaucuucaagauugaggauagcgcccagguggcucggcucuggggcauccgcaagaauagaccugcgaugaacuacgacaaacugucccggagcauucgccaauauuacaagaaaggcaucauuagaaagcccgacaucucucagcggcuggucuaccaguuugugcauccuauuuga

SEQ ID NO: 3419 - RNA, 2217 nt, Artificial Sequence
  AAA36429 variant
augcagcccagaugggcccaaggcgcuaccauguggcugggggugcuccugacacuucugcucugcagcucccuggagggacaggaaaacucuuucacgaucaauagcgucgacaugaagucccuuccugauuggaccguucagaacggcaaaaaucugacacuccaguguuuugccgacgugucuaccacaagccacgugaagccgcaacaucagaugcuguucuacaaagaugacguccuguuuuauaacauuuccucuaugaaaagcaccgaguccuacuucauccccgaagugcggauuuaugauagcgggacauacaaaugcaccguuaucgugaauaacaaggagaagacgaccgcggaauaucagcuccuggucgagggagugccuucuccccgcguuacacuugacaaaaaggaggcuauucagggcgggaucgugagagucaauuguuccgugccugaagagaaagcccccauccacuuuaccauugaaaagcuggagcucaacgagaaaauggugaagcugaagcgggaaaagaauagccgcgaucaaaacuucgucauccuugaguuuccuguugaggagcaggacagagugcugucuuuccggugccaggcccgcauuaucuccggcauucauaugcagacaagcgaaucuaccaaguccgagcucgugacggucacagagagcuuuuccaccccgaaauuccacaucucucccacaggaaugauuauggaaggcgcucaacugcauaucaaguguaccauccaggugacccaccuggcccaggaguuuccugaaauuaucauucaaaaagauaaggcuaucguugcccacaauagacaugggaacaaagcgguguacagcgucauggccaugguggagcacuccggaaauuauacaugcaagguugaaagcucucggauuuccaaggugagcucuaucgucgugaacaucacggaacucuucagcaaacccgagcuggaauccucuuuuacccaucuugaccagggcgagcgccugaaucucagcuguuccauuccuggggcucccccggccaacuucacaauccagaaggaagauaccauugucagccagacacaagacuucaccaaaaucgcuucuaaguccgauagcggaacguacauuugcacagccggcaucgacaaagugguuaagaagucuaacaccgugcagaucgucgugugugagaugcugucccagccuagaauuagcuacgacgcgcaguuugaaguuaucaaagggcaaaccauugaggugcggugcgaguccaucucuggaacacuucccauuagcuaucagcugcucaagaccuccaaaguccuggaaaauucuacaaagaacagcaaugauccugccguguucaaagacaaccccacggaggauguggaauaccaguguguugcugacaauugccacucccacgccaagaugcugagcgagguccuccgcgugaaggugaucgcucccgucgaugaggugcagauuucuauccuguccagcaaaguuguggaaucuggcgaggacaucguccuucaaugcgccgugaacgaaggcuccgggccuauuaccuauaaguuuuacagagagaaagaaggaaagccguucuaucagaugacaagcaaugccacccaggcuuuuuggacaaaacagaaggcgucuaaggagcaagagggcgaauacuauuguaccgccuucaaccgggcuaaucaugccagcuccguuccccgcagcaaaauccugacggugagagucauucucgccccuuggaagaaagggcugaucgcugugguuauuaucggagugaucauugcccuucugaucauugcggcuaagugcuacuuucuccggaaagccaaggccaaacagaugcccgucgagaugucuagaccugcugugccccugcugaacuccaauaacgaaaagaugagcgauccgaauauggaggccaacucccacuacggccauaaugacgaugugcgcaaccacgcuaugaagccuaucaacgacaauaaagaaccccucaacucugauguccaguauaccgagguucaagugagcuccgccgagucucauaaggaccuggggaaaaaggacacagaaaccguguacagcgagguccggaaagcggugccugaugccguugaauccagauauucucgcacagagggaagccuugacggcaccuga

SEQ ID NO: 3420 - RNA, 2736 nt, Artificial Sequence
  AAG23134 variant
auggcccagcuguuccucccccugcuugcugcccuggugcucgcgcaagcuccugccgcccuggcugacguccuugagggcgauagcuccgaagacagagccuuucggguucgcaucgcuggggaugccccgcugcagggagugcucggcggggcgcugaccauucccugccacgugcauuaccugagaccucccccuucucggcgcgccguccucggaagccccagagugaaguggacauuccugucccggggccgcgaggcugaaguucuuguggccagagggguccgggugaaaguuaacgaggcuuaucgcuuuagaguggcccugccugcguacccggccucucucacggacgucagccuggcucuuuccgaacugcggcccaaugauucuggaaucuaucgcugugaggugcagcacggcauugacgauagcuccgacgccguggaggucaagguuaaaggcgugguguuccucuacagagaagggagcgcucgguaugccuuuucuuucuccggagcccaggaggcuugcgcgcgcaucggcgcccauauugcuaccccugaacaacuguacgccgccuaucugggcggauacgagcagugugaugcuggcuggcucagcgaccagacagucagauaccccauccagaccccucgggaggccugcuauggggauauggacggauuucccggcgugagaaacuacggcguuguggauccggacgaccuguaugaugucuacuguuaugcggaagaccuuaauggggagcuguuccucggagauccucccgaaaagcugacacuugaggaagcucgcgccuacugccaagagcggggcgccgagaucgcuaccacagggcagcuguaugccgcuugggacggaggccucgaucacuguucuccuggguggcuggccgacggauccgugagauaccccauuguuacccccagccagcgcugcggcggcgggcugccuggagugaaaacgcucuuucuguucccgaaccagaccggcuuucccaauaagcauucucgguucaacgucuacuguuuuagagauuccgcgcaaccuagcgccauccccgaagccuccaauccugccucuaaccccgcuagcgacgggcuugaggccauugugacagucaccgaaacacuggaggaacuccagcugccgcaggaggcgaccgaguccgaaagccgcggagccaucuauucuauuccuaucauggaggauggcgggggcggauccagcacgcccgaagacccugcugaggcuccccggacacuucuggaguucgaaacccaaucuauggugccucccacaggcuucagcgaggaagaggggaaggcucucgaagaggaggaaaaauacgaggaugaagaggaaaaggaggaggaagaggaagaggaagagguugaggacgaagcccugugggccuggccguccgagcugucuagcccuggacccgaggcuucccuccccaccgaaccugcggcccaggaagagagccugucucaggcuccggccagagccgugcuucagcccggcgcuuccccucugcccgacggggagagcgaagccucucgcccuccccggguccacggaccucccaccgagacacucccgacgccuagagaacgcaaucuggcgucccccagcccuuccacccugguggaggcucgggagguuggcgaagccacagggggccccgagcuuucuggagugccgagaggcgaaagcgaggaaaccggguccucugagggagccccuagccuccugcccgcuacacgggccccugagggcacccgcgaacuggaggcgcccuccgaagauaacagcgggagaacggcucccgccggaacaucuguccaagcccagccugugcucccgaccgacuccgcuagccggggcgggguggccguuguccccgcuucuggcgauugcgugccuucccccugucacaauggagggaccugccuggaggaagaggagggggugagaugccuuugucugccuggauauggcggggaccucugcgaugucggacugcgcuuuuguaaccccggcugggacgccuuccagggggcgugcuacaaacauuuuagcacacggagaucuugggaagaggccgaaacccagugucgcauguauggcgcucaccuggccagcauuuccacaccugaggaacaagauuucaucaauaacagauaccgggaguaucaguggaucggacuuaaugaccgcacgauugagggcgauuuucucuggagcgacggggugccgcugcuguacgaaaacuggaaccccggacagccugauucuuacuuccucuccggcgagaauugcguugugauggucuggcaugaccaggggcaauggagcgaugugcccuguaacuaucaccuguccuauaccugcaagaugggacuuguuucuuguggcccucccccggaacugccucucgcucagguguuuggcagaccccggcugcgcuacgaggucgacacagugcugagauaccggugccgcgaggggcuugcccagagaaaucucccccugauccggugucaggaaaacggacgcugggaggccccucaaauuagcugcguucccagacggccugcuagagcgcugcacccggaagaggaccccgaaggccgccaggggcggcuccugggaagauggaaagcccuucugaucccucccuccucuccuaugcccggcccguga

SEQ ID NO: 3421 - RNA, 3321 nt, Artificial Sequence
  AAA60049 variant
augagacugcccggcgccaugccugcucucgcccugaagggggagcuucugcuccugagccuucugcuccugcuggaaccgcagaucucccaaggacucguggucacacccccuggccccgagcugguucuuaacgugucuagcaccuucgugcugacgugcuccgggucugcgccugucgugugggaacggaugagccaggagcccccucaggaaauggcuaaagcccaggacggaaccuuuuccucuguucucacacugaccaaucuuacaggccuggauaccggggaguacuucuguacacacaacgacagccgcggacucgagaccgaugaaagaaagcggcuguauauuuuugugccggaccccacggucggcuuccugccuaaugaugccgaggaacucuuuaucuuccugaccgagauuacagagaucaccauucccugccgcgugacagacccucaacuuguugugacccugcaugaaaagaagggcgaugucgcucuccccgugccguacgaccaccagagaggguuuuccggaaucuucgaggaucggagcuauaucuguaaaacgacaauuggcgaccgcgaaguggauucugacgccuacuaugucuacagacugcagguuuccagcaucaacgugucugugaaugcuguccagaccgugguucggcaaggggagaacauuacacuuaugugcaucgugauuggaaaugaagucgugaacuuugaguggaccuauccucgcaaggaguccggcagacugguugaacccgugaccgauuuccuccuggacaugccuuaccauauccggagcauucugcacauccccucugccgagcucgaagacuccgggacauacacguguaaugucaccgagagcgugaacgaucaucaggacgaaaaggcgaucaauauuacagucguggaguccggauauguucgccugcuuggcgaggugggcacccugcaguuugccgaacuccacagaucucggacacugcaggucguguucgaggcuuaucccccuccgaccguucuuugguuuaaagauaaccgcacgcugggggacagcuccgccggagaaaucgcucucagcacaagaaaugugucugagacccgguacgucuccgaacugacccuggugagagugaagguugccgaggcgggccacuacacaaugcgcgccuuccaugaggaugcugaaguccaacucagcuuccagcugcagauuaacgugcccgugcggguccuugagcugucugaaagccacccugacuccggggagcaaaccgugagaugccgcggacggggcaugccccagccuaauaucauuuggucugccuguagagaucucaaacgcugcccccgggagcugccgccuacacugcuugggaacagcuccgaagaggaaagccagcucgagacgaacguuaccuauugggaagaggagcaggaauuugagguggucucuacacugagacugcaacauguggaccgcccccucuccguucgguguacccugagaaaugcugugggacaggauacacaggaagucaucgugguuccucacagccuucccuucaagguggucgugaucucugccauucuggcccucgugguccugaccaucauuucccugaucauucuuaucaugcucuggcagaaaaagccucgcuacgagauccgguggaagguuauugaaagcguguccucugacggccacgaguauaucuacguggaucccaugcaacugccguacgacagcacgugggagcugccuagagaccagcucguccugggccggacccuuggguccggagcuuuuggccaggugguugaagcgacagcccaugggcugucucacagccaggcuaccaugaaaguggccgucaagaugcucaaauccacagcccgcagcucugagaagcaagcucugauguccgaacugaaaauuaugagccaucuuggaccccaccucaacgugguuaaucugcugggcgccugcaccaaagggggccccaucuauauuaucacggaguacuguagauauggagaucucguggacuaccugcaucggaacaaacacacauuccuucagcaccauucugauaagagacgcccuccguccgcggaacuguauagcaaugcucuccccgucggccugccucugcccucucacgugagccuuaccggggaguccgacggaggcuacauggauaugagcaaggacgagucuguugauuaugugccuaugcucgacaugaaaggggaugucaaguacgccgacauugaauccagcaacuacauggcccccuaugauaauuacgugccuuccgcucccgagcggacaugcagagccacccugaucaacgaaucuccggugcugagcuauauggaccucgucggauuuuccuaccagguugcuaauggcauggaguuccuggccucuaaaaacugcgugcaucgcgaucuugcggccagaaaugugcugaucugugaggggaagcucgucaaaauuugcgacuuuggccuggcucgggacaucaugcgcgauagcaacuauauuuccaagggaucuaccuuccugccucuuaaguggauggcccccgaaagcaucuuuaauucccuguacacaacgcucagcgacguguggucuuucggcauucugcucugggagaucuuuacccuugggggaacaccuuaucccgaacugccgaugaacgagcaguucuacaaugcuaucaaaagaggcuaccggauggcccaaccugcgcacgccuccgaugaaauuuaugagaucaugcagaaguguugggaggaaaaauuugagauuagacccccuuucagccagcugguucuccugcuggaacgccuucugggggagggauacaagaaaaaguaucaacagguggacgaagaguuccuccggucugaucaccccgcuauccugcgcucccaggccagacuccccggcuuucaugggcugcggagcccucuugacaccucuuccguccuguacacagcugugcagccgaacgagggcgauaacgacuauauuaucccccucccugaucccaagccugaaguugccgacgagggaccccuggaaggcagcccuucccuggccagcucuacccuuaaugaggugaacacgagcuccacaaucucuugcgauagcccgcuggaaccccaagacgagccugagcccgaaccucagcucgagcugcaggucgaacccgagccggagcucgaacagcugccugauuccgggugucccgcuccccgcgcggaggccgaagacucuuuccuuuga

SEQ ID NO: 3422 - RNA, 942 nt, Artificial Sequence
  EAX03935 variant
augcugcucagcaagaucaacucccuggcccaccuuagagcugcccccugcaaugaccugcaugcgaccaaacucgcuccuggcaaggagaaagaaccgcuggagucucaguaccaaguggggccccuucugggaagcggcggguucggauccgucuauucuggcauucggguuagcgauaaccucccuguggccaucaagcacguggaaaaagaccgcauuuccgauuggggagagcugcccaauggaacaagagucccuauggaagugguucugcucaagaaggugucuagcggcuuuuccggcgucauccggcugcuugacugguucgagcgccccgauagcuuugugcugauucucgagagaccugaaccgguucaggaccuguucgauuuuaucacggagcgcggggcccuucaggaggaacuggcucggucuuucuuuuggcaagugcucgaggccgucagacauugucacaacugcggagugcugcaucgggacaucaaagaugaaaauauucugaucgaccucaaccgcggcgagcugaaacuuauugauuucggguccggagcucugcucaaggacaccguguacacagauuuugacggcaccagagucuauucucccccugaauggauccgguaccaccgcuaucacgggagaagcgccgcgguuuggucccuggggauucuucuguacgacaugguguguggcgauauccccuucgagcaugacgaagagauuauccggggccagguguuuuuccgccagagagucagcucugagugccagcaccucauccgguggugucuggcccugagaccuuccgaucgccccacauuugaagagauucagaaucauccguggaugcaagacgugcuccugccucaggaaaccgcugagauccaccuucacagccugucccccgggccuucuaaguga

SEQ ID NO: 3423 - RNA, 303 nt, Artificial Sequence
  AAB81333 variant
auggccgacgaggaaaagcugcccccuggcugggagaaaagaaugagccggccguccgggcgcggauacuauuucaaccacaucaccaaucccucucagugggaaagaccuagcggcaacuccucuagcgggggaaagauuuggcaaggcgagcccgcucgggugcgcagaucccaucuccuggucaaaccuguuaaggccgcgcuugaucuggcugccgggaaucaccccgaccagggaggcggcccuggggccgaucagcggcuccauccggaagaccagggacgcagagagggccuguga

SEQ ID NO: 3424 - RNA, 492 nt, Artificial Sequence
  AAC50492 variant
auggccgacgaggaaaagcugcccccuggcugggagaaaagaaugagccgguccucugggcgcguguacuauuucaaccacaucaccaaugcuagccagugggaaagaccguccggaaacucuagcuccggcgggaagaauggacaaggcgagcccgcccggguccgcugcucucaucuccugguuaaacacagccaguccagacggccuagcucuuggcgccaggaaaagauuacaagaacgaaagaggaggcgcuugaacugaucaacggguacauucagaagaucaaguccggagaggaagauuuugagagccucgcuucucaauucuccgacuguagcucugccaaagcccggggcgaucugggcgcuuuuucccgcgggcagaugcagaagcccuucgaggacgccagcuuugcucuuagaaccggagaaauguccggcccuguguucacagauucugggauucauaucauccugcggaccgaguga

SEQ ID NO: 3425 - RNA, 138 nt, Artificial Sequence
  AAH31971 variant
augcagaagcccuucgaggacgccagcuuugcucugagaaccggcgaaauguccgggccuguguucacagauucuggaauccacauuauccuccggacggagugcuggcgccaaaccagaggcccgaacuguuuuuga

SEQ ID NO: 3426 - RNA, 639 nt, Artificial Sequence
  AAG22596 variant
augaagguguucaaauuuaucggccugaugauucuccugaccagcgccuucuccgcugggucuggacagagccccaugacaguccuuugcuccaucgacugguuuaugguuacggugcacccuuucaugcugaacaaugauguguguguccauuuucacgagcuccaucugggccuugggugcccgcccaaccacgugcaaccucaugccuaccaguucaccuauagaguuacagaauguggcauucgggcgaaggcugugucucaggacauggucaucuacagcaccgagauucacuauuccucuaaaggaacacccagcaaguuugugaucccuguuuccugcgccgcuccccagaaaagcccuuggcugaccaagccguguucuaugcgcguggccuccaagagcagagccacagcucaaaaagaugaaaagugcuacgaggucuucucucucucccagagcucucagcggcccaauugugacugcccucccuguguguuuuccgaagaggagcacacccaggugccuugccaucaagccggggcgcaggaagcccagccccugcagccgagccacuuccuggauaucuccgaggacuggucucuccauacggaugacaugauuggaagcauguga

SEQ ID NO: 3427 - RNA, 1986 nt, Artificial Sequence
  AAB00386 variant
auggaccuggugcucaagagaugccugcuucaccuggccgucaucggcgcucuccuggccguuggggcgaccaaagugccccggaaccaggauuggcuuggagugagccgccaacugagaacaaaggcuuggaaucggcagcucuacccugaguggacggaagcccagcgccuggacuguuggagaggcgggcaggucucccugaaagugucuaacgauggaccgacccucauuggcgccaaugcuagcuucuccaucgcccugaacuuucccgggucucaaaagguucuuccugacggacaggugauuugggucaauaacacaaucauuaauggcagccagguguggggcgggcagcccguuuauccucaagagaccgaugacgcuugcaucuuccccgauggaggcccuuguccguccgggucuuggagccagaaacgguccuuuguguacgucuggaagacauggggacaguauuggcaagugcugggcgggcccgugagcggacucucuaucggcaccggccgcgccaugcuggggacacauaccauggaagucacgguuuaccacagacggggaucccgcagcuaugugccucuugcgcauucuuccagcgccuucaccauuacagaccaggugcccuuuucugucuccgugagccagcugagagcucucgauggcgggaacaagcacuuccugcggaaucagccucugaccuuugcccuccaacugcaugaccccuccggauaccuugcugaggccgaucugucuuauacaugggacuucggcgauagcuccgggacccucaucagccgcgcgcugguugugacgcacacauaccuugaaccgggaccugucaccgcccaggugguucugcaggcugccauuccccucacaucuugcggcuccagcccugugcccggcaccaccgacgggcacagacccacagcugaggccccuaacacgaccgccggacaggucccgacaaccgagguggucggcacaacccccgggcaagcuccuacggcggaacccucuggaacaaccagcgugcagguuccuaccacagaggugaucuccaccgcccccguccagaugccgacagcugaaucuacgggcaugaccccugagaaagugcccguuagcgaggugauggggacaacccuggccgaaauguccacaccugaggccaccggcaugacgcccgcugaagucagcauuguggugcugucuggaaccacagccgcgcagguuaccacaaccgagugggucgaaacgacagcucgggagcucccuauccccgagccggaaggcccugacgccuccagcauuaugucuaccgaguccaucacagggagccugggaccccuucuggauggcaccgccacccuccgccuggugaagagacaagugccccuugacuguguccuguaccgguauggguccuuuucugugacacucgauaucguucagggaauugaaagcgcugagauccugcaggccgugccuuccggcgaaggggacgcuuucgagcugacggucucuugccagggcggacucccgaaagaggccuguauggaaauuagcucccccggcugccaaccucccgcgcagagacugugucagccugugcuucccagcccugccugccagcugguucuccaucaaauccugaaagggggaucuggcaccuacugucugaaugugucccuugcugauacaaacagccucgccgucgugucuacccagcugauuaugcccgggcaggaggcuggacugggccaaguuccgcucaucguggggauccugcuuguccugauggccguggugcucgcgucccugauuuaucgccggagacugaugaagcaggacuuuagcgucccucagcuuccccacucuagcucccauuggcuccgccugccucggaucuucugcagcugccccauuggcgaaaauucuccgcugcucuccggacagcaaguuuga

SEQ ID NO: 3428 - RNA, 2649 nt, Artificial Sequence
  CCDS10255.1 variant
auggagcccgccccugcuagaagcccgcggccccagcaagacccugcccgcccccaggaaccuaccaugcccccuccggagacacccuccgaaggcagacagccuucucccagcccuucccccacggagcgggcgccggcuucugaagaggaguuccaguuucugcgcugccaacagugucaggccgaagccaagugcccuaaacuccugcccugucuucacacccugugcagcgggugucucgaggcuuccggaaugcagugcccuaucugucaagcccccuggccccugggcgcugauaccccugcccuugacaacguguucuuugaaucucugcagagacggcucagcgucuaccgccagauuguugaugcgcaggccgugugcacaagauguaaggaguccgcugacuucuggugcuuugagugugaacaacugcugugcgccaaaugcuucgaggcucaucagugguuucucaagcacgaagcccggccgcuggcggagcuucgcaaucagagcgugagagaauuucuggaugggacacggaaaaccaacaauaucuuuuguucuaaccccaaucaucgcacaccuacccucacguccauuuauugcagaggauguagcaagccccugugcuguucuugcgcccuucuggacuccagccacucugagcucaagugugauaucuccgcugagauucaacagcggcaggaggagcuggacgccaugacccaggcucugcaagaacaggauagcgccuucggcgccguccaugcucagaugcacgcggccguggggcagcucggacgcgcuagagccgagacagaggaacugauccgggagagaguucgccaaguggucgcccacgugcgggcucaggaaagagagcuucuggaagccguugacgcgcgcuaccagcgggauuaugaggaaauggcuuccagacucggccgccuggacgccgugcuucagcggaucagaaccggcucugcccugguccaacgcaugaaaugcuacgcuagcgaucaggaggugcucgacaugcauggguuucugcggcaggcccuguguagacuccgccaggaggaaccucaaucccugcaggcugccgugcggacagacggauucgaugaguuuaaggucagacuucaggaccugagcucuugcauuacccaaggcaaagaugcggccguuuccaagaaagcuagccccgaagccgcuucuacgccgcgggacccuaucgauguggaccuccccgaggaggccgaacgcgugaaggcgcagguccaggcccuggggcuugcugaggcccagccuauggcugugguucaaagcgugcccggagcccacccuguccccguguaugccuucuccauuaagggcccgucuuacggggaagauguuagcaacacaaccacagcucagaaaagaaaguguucccagacccagugcccucggaaagugaucaagauggagagcgaagagggaaaagaggcgagacuggcccggucuucccccgaacaaccccgcccuagcaccucuaaggcugucuccccgccccaucucgacggcccucccagcccuagaucccccgugauuggcucugaggucuuccugccuaauagcaaccacguggccuccggggccggagaagcugaggaacgcguuguggucaucucuagcuccgaggauagcgacgccgaaaauucuuccagcagagaacuggaugacucuuccagcgagucuagcgaccuccagcuggaaggccccuccacacuucgggugcuggaugagaaccucgcggacccgcaggcugaagaucgcccucugguuuucuucgaccugaaaauugauaaugagacgcagaagaucagccaacuugccgccgugaacagagagucuaaguuucgggucgugauccagcccgaggcuuucuuuuccauuuauagcaaagccgugucccucgaaguugggcugcagcacuuccugucuuuucucagcuccaugcgcagaccuauccuggcgugcuacaaacuuuggggacccggccugccgaauuucuuucgggcucucgaagacauuaaccgccugugggaguuccaagaggccaucucuggguuucuggccgcccuuccucucauuagagaacggguccccggagcuagcuccuucaagcugaagaaucuggcucagaccuaccucgcccgcaacaugucugagagaagcgcgauggccgcugugcuggccaugcgggaucuuuguagacugcucgaaguguccccuggcccccagcuggcucagcaugucuaucccuuuagcucucugcaaugcuucgccucccuucagccucucgugcaggccgcuguucugccgcgcgcggaggcccggcugcucgcucugcacaacgugagcuucauggaacuucugucugcccauagacgcgaccggcagggcgggcucaaaaaguacuccagauaucugagccugcaaacaaccacacuucccccugcccagcccgcuuuuaaucuccaggcccugggaaccuacuucgagggccugcucgaggggccugcgcuggcucgcgccgaaggagucucuacgccccuugccggccgggggcuggcugagagagccucccagcaaagcuga

SEQ ID NO: 3429 - RNA, 3228 nt, Artificial Sequence
  CCDS46409.1 variant
augguggucgagguugacagcaugcccgccgcuuccucugugaagaaaccuuucggccugagaagcaagauggggaaauggugcugucggugcuuuccguguugccgcgaauccggaaagucuaacgugggcaccagcggggaucacgacgauuccgccaugaaaacacucagaucuaagaugggaaaguggugucggcauugcuuccccuguugccgcggcagcgggaaauccaaugucggagcgagcggcgaccacgaugacucugcuaugaagacgcugagaaacaaaaugggcaagugguguugccauuguuuuccuugcugccggggguccagcaaaucuaaggugggagccuggggcgauuacgacgauuccgccuucauggagccccgcuaucacguuagaggggaagaccuugauaagcugcaucgggcugccugguggggaaaagugccucgcaaggaccucaucgucaugcugagagauaccgacgugaauaaacaggacaagcaaaaacggacagcccuucaccuggcuagcgcgaacggcaauucugagguugugaagcuccugcuggaucgcagaugucagcucaacguccuggacaauaaaaagcggaccgcccuuauuaaggcugugcagugccaggaagaugagugugcccugaugcuccuggagcacgggacagaccccaacaucccugaugaauacggaaauaccacacuucauuaugcuauuuacaacgaggacaaacugauggccaaggcgcuccugcuguauggcgccgauaucgaauccaaaaauaagcacggccucaccccgcugcuucugggggugcaugagcaaaaacagcaggucguuaaguuucucauuaagaaaaaggcuaaccugaaugcccuugaccgcuacggaagaacggcucugauccucgccgugugcuguggcagcgccuccaucgugucucugcugcucgagcagaacauugaugucagcucccaagaccugagcgggcagaccgcucgggaauaugcggugucuucccaccaccauguuaucugccagcuucugagcgauuacaaagagaagcagaugcucaaaauuucuagcgaaaauuccaaccccgagcaagaccugaaacuuacaucugaagaggagagccagagauucaagggauccgaaaacagccagccugagaagaugucucaagaacccgagaucaauaaggacggcgaucgcgaaguggaggaggaaaugaaaaagcacgaguccaacaaugucgggcugcucgaaaaccugaccaauggagugacagccggcaacggcgacaaugggcugauuccucagcggaaaagcagaacccccgagaaccagcaguuuccggauaaugaaucugaggaguaccaucgcaucugugaacuccuguccgacuauaaggagaagcaaaugccuaaauacagcuccgaaaacucuaaucccgagcaggaucuuaagcugacgagcgaggaagagucccagcggcucaaaggaucugaaaacggccagccugagaagagaagccaagaacccgagauuaauaaagacggggaucgcgagcuggaaaacuucauggcuaucgaggaaaugaagaaacaccgguccacacauguuggauuucccgagaaucugaccaacggcgccacagccgggaacggcgacgauggacuuaucccuccgagaaagagccgcacccccgaaucucagcaguucccugacaccgagaaugaggaauaucacuccgaugagcagaacgacacacaaaagcaguuuugcgaggaacagaauacgggcauucuccacgaugaaauccugauucaugaggagaaacagaucgaaguggucgagaagaugaacagcgaacugucucucuccuguaaaaaggagaaagacauucugcacgagaauagcacccuucgggaagagaucgcuaugcugagacucgaacuggacacaaugaagcaucaaucucagcugcgcgagaagaaauaccuugaagauaucgagagcgugaagaaacggaacgacaaucuccugaaggcccugcagcucaacgagcugaccauggaugacgauacagcgguccuugugauugacaauggguccggaaugugcaaagcuggcuucgccggggaugacgcccccagagcuguuuuuccuagcaucgugggacggccccgccaacagggcaugaugggcgggaugcaccagaaggaaucuuaugucggaaaggaggcccaguccaaaagaggcauucugacccucaaguacccgauggaacacgggaucauuacgaacugggaugacauggagaaaaucuggcaucacacauucuauaaugaacugcggguggcuccugaggagcaucccguucugcuuaccgaagccacccucaacccuaaggcgaauagagagaaaaugacacaaaucauguucgaaaccuuuaacacacccgccauguacguggcuauucaggccguccugagccuguacacguccggacgcaccacaggcaucgugauggauucuggggacggagugacccacacaguuccuauuuaugagggcaaugcucucccccaugccacccugcggcuugaucuggcggggagagaacucccggacuaccugaugaagauccugacggagcacggcuaucgcuucaccacaauggccgagagagaaauuguccgggacaucaaggagaaacuuuguuacguggcucucgauuuugaacaggagauggccaccguggcuagcuccucuagccuggagaaguccuaugaacugccugacggacaggucauuacaaucggcaacgagcgcuucagaugccccgaagcccucuuucaacccugcuuccuggggauggagucuuguggaauccacgaaaccacguuuaacagcauuaugaaauccgauguggacauccggaaggaucuuuacacaaauaccguucugagcggcgggacaaccauguauccuggaauggcccaucgcaugcagaaagagauugcugcgcucgccccgucuaugaugaagaucagaauuaucgcucccccuaaacggaaguacuccgugugggucggcgggagcauccuggccucucuguccaccuuccagcagauguggauuagcaagcaagaguacgacgaaucuggccccuccaucgugcaccgcaaaugccuuuga

SEQ ID NO: 3430 - RNA, 1755 nt, Artificial Sequence
  CCDS13562.1 variant
augguggccgaggucugcagcaugcccaccgcuuccacaguuaagaaaccuuucgaccugagaucuaagaugggcaaauggugucaccaucgguuuccgugcugucgcgggagcggaaaguccaacaugggcacgucuggggaucacgacgauagcuucaugaaaaugcucagauccaagaugggaaagugcugucggcauugcuuucccuguugccgcggcucugggaccagcaaugugggaacauccggcgaccacgaaaacagcuucaugaaaaugcugagaucuaagaugggcaaaugguguugccauuguuuuccuugcugccggggguccggaaagagcaaugugggcgccuggggagauuacgaccacucugcguucauggagccccgcuaucacaucagacgggaagaucuugacaaacugcaucgcgcugccuggugggggaaggucccuagaaaggaucucauugugaugcugcgggacaccgauaugaacaaacgcgacaaggagaaaagaacagcccuucaccuggcuuccgccaauggcaacagcgaaguugugcagcuccugcuggaucggcgcugucaacucaauguccuggacaacaagaaaagaaccgcucuuaucaaggccauucagugccaggaggacgagugugugcugaugcuccuggaacauggggcggaucggaauauccccgacgaguacggaaacacagcccuucacuaugcuauuuacaaugaagauaaacugauggccaaggcucuccugcuguauggcgccgacaucgagucuaagaacaaaugcggccucaccccucugcuucuggggguucacgagcagaagcaacagguggucaaauuucucaucaagaaaaaggcgaaucugaacgugcuugauagauacggacgcacggcccugauucucgcuguguguugcggcuccgccagcaucgucaaucugcugcucgaacagaacguugacguguccucucaggaucugagcgggcaaaccgcucgggaguaugccguguccagccaucaccaugucauuugugaacuucugucugacuacaaggagaaacagaugcucaagaucuccagcgaaaacucuaauccggagcaggaucugaaacuuacaagcgaggaagagucccagagacugaaggugucugaaaacagccaacccgagaaaaugucccaggaaccugagauuaauaaggacugcgaucgcgagguugaagaggaaaucaagaaacacggaagcaaccccgugggccucccugagaaucugaccaacggggccucugcuggaaauggcgacgacggccugauuccccagcggagaucccgcaagccggaaaaccaacaguucccugauacagagaaugaggaauaccauagcgacgagcagaacgauacccggaaacagcucucugaagaacaaaauacggggaucucccaggacgagauccugacaaacaagcagaaacagauugaagucgcggagcaaaagaugaauagcgaacuuucccugucucacaagaaagaggaagaucuccugagagagaacagcgugcugcaggaggaaaucgccaugcuucgccucgagcuggacgaaaccaagcaccagaaucagcugcgggagaacaaaauucucgaagagaucgaguccguuaaggagaaaacagauaagcugcuuagagcuaugcaacugaacgaggaagcccucaccaaaaccaauauuuga

SEQ ID NO: 3431 - RNA, 1530 nt, Artificial Sequence
  EAW59519 variant
auggagagacggcgccuguggggcagcauccaguccagauacauuucuaugagcguguggaccucuccccggcgccucgucgaacuggccgggcaaucccuucugaaggacgaggcucucgccaucgcggcucuggaacuucugccuagagagcuuuucccgccccuguuuauggccgccuucgauggacggcacagccagacacugaaagcuaugguucaggccuggccuuuuacgugccucccccugggcgugcuuaugaaggggcagcaucugcaccucgaaaccuucaaagcugugcuggacggacuugauguccugcucgcccaagaggugcgcccuagacgguggaagcugcagguucuggaccuccgcaaaaacucccaucaggauuuuuggacaguguggucuggcaauagagcgagccuguauuccuuccccgagccugaagccgcucagccgaugaccaagaagcggaaagucgacgggcuuagcacagaggccgaacaacccuuuauuccuguggagguucugguggaucucuuccugaaggagggagcuugugacgaacucuuuucuuaccugaucgagaaagucaagcgcaaaaagaacgugcucagacugugcuguaagaaacugaagauuuucgccaugcccaugcaggauaucaaaaugauccucaagauggugcagcuggacuccauugaagaucuugagguuaccugcacauggaaacugccuacccucgcgaaguuuagccccuaucugggccagaugaucaaucuucggcgccugcuccugucucacauucaugccuccagcuacaucucuccggaaaaagaggagcaauauauugcucaguucacgucccaguuucugagccuccaaugucugcaggcccuuuacgucgacucccuguucuuccucagaggccggcuggaucagcugcuuagacacgugaugaacccucucgaaacccugucuaucacaaauugccgccugagcgagggggacgugaugcaccucucccagagccccucugucucccaacugagcgugcuuucucugagcggaguuaugcucaccgacguguccccugaaccccugcaggcucugcuugagcgggccucugccacacuccaggaucuggucuuugacgaauguggcauuaccgaugaccagcugcucgcucugcuucccagccugucccauugcagccaacucacgacacugucuuucuaugggaacuccaucagcaucucugcgcugcagucccuucuccagcaccugauuggacugagcaaucucacccaugugcuguacccuguuccgcuugaguccuacgaggauauccacggcacacugcaccucgaaagacuggccuaucugcaugcucgccuucgggagcuccugugugaacuggggagacccucuaugguguggcucagcgccaacccuugcccccacuguggagaccgcaccuuuuacgauccugagcccauucugugcccgugcuucaugccuaauuga

SEQ ID NO: 3432 - RNA, 1530 nt, Artificial Sequence; identical to SEQ ID NO: 3431
  AAC51160 variant

SEQ ID NO: 3433 - RNA, 645 nt, Artificial Sequence
  CCDS8069.1 variant
augggccuggccggggugugcgcucucagacggagcgccggauacauccuggucggcggggcgggaggccaguccgcugccgccgcugcccgcagauauucugagggggaaugggcuagcggaggcguucgguccuucucucgcgccgcggccgcuauggcccccauuaaggugggcgacgcuaucccugccguggaggucuuugaaggggagccgggaaacaaagugaaucuugcggaacuguucaagggcaaaaaggggguucucuuuggagugcccggcgccuucaccccuggguguagcaaaacacaucugcccggauuugucgagcaagcugaggcccuuaaggcuaagggcgugcagguuguggccugccuguccgucaacgaugccuucgugacgggcgaaugggggagagcucacaaagcggagggaaaggugcggcuccuggccgacccuaccggcgcuuuugggaaagaaacagaucugcuccuggacgauucucuugucagcauuuucggaaaucgcagacugaagcgguuuuccaugguugugcaggacggcaucgugaaagcccucaacgucgagcccgaugggaccggacugacauguagccuugccccuaauauuaucucucagcuguga

SEQ ID NO: 3434 - RNA, 309 nt, Artificial Sequence
  AAA63250 variant
auggugagauaccggguccgcagccuguccgagagaucucacgaaguuuaucggcagcaacuccauggccaggagcaggggcaccauggacaggaggaacaaggccugagccccgaacacguggagguguacgagcgcacccaugggcagucccacuauagacggcgccacugcucuagacggcgccuucauagaauccaccggcgccagcauagaagcugucggcgcagaaagcggagauccugccgccaccggagacgccaccggagaggaugucgcacacggaaaagaacgugccgccggcauuga

SEQ ID NO: 3435 - RNA, 1662 nt, Artificial Sequence
  AAH50416 variant
auggugcagagacugugggucagccggcuccugcgccacagaaaggcccaacuucugcucguuaaccugcuuaccuucggccuggaggugugccucgcugccgggaucacauacgugcccccucugcugcucgaagucggaguggaggaaaaauuuaugacgaugguucugggcauugggccggugcuuggacuggucugugugccccuccugggcuccgcgucugaccauuggcgggggcgcuauggaagacggcgcccuuucaucugggcucuuagccugggcauucuccugucccuguuucucauccccagagccggcuggcuggccgggcuucugugcccugauccccggccucucgagcuggcccuucugauucucggaguuggccugcuggacuucuguggacaggugugcuuuaccccgcucgaagcucugcuuucugaucuguuccgcgaccccgaucacuguagacaggcuuacagcgucuaugccuuuaugaucucccucgggggcugccugggguaccuucugccugcgaucgacugggauacaucugcccucgcucccuaucugggaacccaggaggagugucuguucggccuccugacacuuauuuuucugaccugcguggccgcuacacuccugguggccgaagaggcggcccugggcccuaccgaacccgcugaggggcuuagcgccccgucccucagcccucauuguugccccugucgggcucgccuggccuucagaaaucugggagcccuccugccucggcuucaccaacugugcugccgcaugcccagaacgcuccggagacuguuugucgcugagcuguguucuuggauggcgcuuaugaccuucacacucuuuuacaccgacuucguuggcgaagggcuguaucagggagugccccgcgccgagccuggcacagaagcucggagacauuacgaugagggggugcgcaugggaucccugggccucuuccugcagugcgccaucagccuugucuuuucucuggugauggaccggcucguucagagauucggcacccgcgccguguaccuggcuuccgucgccgcguuuccgguggcugccggggccacgugucugagccacucuguugcuguggucacagccuccgcugcccuuaccggauucacauuuagcgcgcuccaaauucugcccuauacccuggccucccucuaccaccgggaaaaacagguguuccugccuaaguauagaggcgauaccgggggagcuucuagcgaggacucccuuaugacgagcuuucugcccggcccuaagcccggggccccguucccuaacggccaugucggagcuggcgggucuggacuccugcccccucccccugcccugugcggcgcguccgccugugaugugagcguucgcguggucgugggggagcccacagaagcucggguugugccgggaagaggcaucugccuugaccucgccauucuggacucugcuuuucugcucagccaggucgccccuucccuguucauggggucuaucgugcagcuuagccaauccgugaccgccuacaugguuagcgcugcgggccugggacucgucgccauuuauuuugcuacacaggugguguucgauaaaucugaccuggccaaguacuccgccuga

SEQ ID NO: 3436 - RNA, 648 nt, Artificial Sequence
  CBI83574 variant
auggccagccugcagaugagaggcaaccccgggucccacuucugcggaggcacccucauccauccuucuuuugugcugacagcugcccacugucuucgggacauuccgcaacgccuggucaauguugugcucggggcgcauaacgugagaacgcaggagcccacccagcagcacuucagcgucgcucaaguguuucugaauaacuacgaugccgaaaauaaacuuaacgacauccugcucauucagcuguccucuccugccaaucugagcgcuuccguugccacagugcagcucccccagcaagaucagccugucccccauggaacccagugccuggcuaugggcugggggcgggugggagcccacgacccuccggcgcagguucuucaagagcugaacgugacagucgugaccuucuuuugucgcccccacaauaucugcacauucgugccuagacggaaggccggcauuuguuuuggcgauucugggggaccccucaucugcgacggcaucauucaggggaucgauagcuucgucauuuggggaugugcuacccgccuguuuccugacuucuuuacgagaguugcccuuuauguggauuggauccgguccacccugcgcagaguggaagcuaagggccggcccuga

SEQ ID NO: 3437 - RNA, 771 nt, Artificial Sequence
  AAH96183 variant
auggcccacagacccccuagcccggcucuggccuccgugcuccuggcgcuucugcucucuggcgcugcccgggccgcugagaucgucgggggacaugaagcccagccccacagccgcccuuacauggcuucccugcaaaugagaggcaaccccgggucucauuucugcggaggcacccuuauucacccuagcuuuguucugacagccgcgcauugucuccgggacaucccccagcgccuggugaaugugguccugggggcccacaacgugagaacgcaggagccuacccagcaacacuucuccguugcucagguguuucucaauaacuaugaugccgaaaauaagcugaacgacguccuucugauucagcucucuagcccggcuaaucuguccgccagcguggcgacaguucagcuuccccaacaggaucagccugugccccauggaacccagugccuggccaugggcuggggccgggucggggcucacgacccucccgcccaagugcuccaggagcugaacgugacagucguuaccuucuuuugucgcccgcauaauaucugcacauucgugccuagacggaaagcuggaauuuguuuuggcgauucugggggaccccugaucugcgacggcaucauucaggggaucgauuccuucgugauuuggggaugugccacccgccucuuuccugacuucuuuacgagagucgcccuguacguggauuggauccggagcacccuucgcagaguugaagcuaagggccggcccuga

SEQ ID NO: 3438 - RNA, 2760 nt, Artificial Sequence
  CCDS45721.1 variant
auguggcuggccgcugccgcgcccagccucgcuagacggcugcuuuuccugggcccuccgcccccuccccuccugcuucugguguuuucccgcucuagcagacggcgccuccacucccuggggcuggccgccaugccugagaagagacccuucgaacggcucccugcugacgucucuccgaucaacuacagccugugccuuaaacccgaucugcucgacuuuaccuucgagggaaagcuggaagccgcugcccagguucgccaagcgacaaaucagauugugaugaacugugccgauaucgacauuaucacggcuuccuaugccccugagggcgaugaagagauucaugcuaccggguuuaauuaccagaacgaggacgaaaaagugacacuuucuuuccccagcacccugcagacaggaaccggcacacucaagaucgauuuugucggggagcugaaugacaaaaugaagggauucuauagauccaaguacaccacgccuagcggcgaagugcgguaugccgcgguuacccaauuugaggccacagaugcucgcagagccuuccccugcugggacgagccggcuaucaaagccaccuuugauauuucucugguggucccuaaggaccggguggcccucuccaacaugaauguuaucgaucgcaaacccuacccugacgacgaaaaccugguggaggucaaguucgcuagaacacccgugaugagcaccuaucuuguggcguuugucguuggcgaauacgauuucguggagacgcggucuaaagacgggguguguguccgcguguacacacccguuggaaaggccgaacagggcaaguucgcucuggagguggccgccaaaacccucccuuuuuauaaggauuacuucaaugucccguauccccugccuaaaauugaccuuaucgcuauugccgauuuugcggcuggggccauggagaacuggggacuggugacauacagagaaaccgcccuccugaucgaccccaagaauagcugcuccucuucccggcaguggguugcucugguggucggccacgagcucgcccaucagugguucgggaaccuggugaccauggaaugguggacacaccuuuggcugaaugagggauuugcuagcuggauugaauaucucugugucgaucauugcuucccugaguacgacaucuggacgcaauuuguguccgccgauuauaccagagcgcaggagcuggacgcccuugauaacucucaccccaucgaaguuagcgugggccacccguccgaggucgacgaaauuuucgacgcuaucagcuacucuaaaggcgccuccgugauucgcaugcugcaugauuacaucggggacaaggauuuuaaaaagggaaugaauauguaucucacaaaguuccagcagaaaaacgcugccaccgaggaccugugggaaagccuggagaacgcgucuggcaagccuauugccgcuguuaugaauacauggaccaaacaaaugggguuuccccucaucuacguggaggccgaacaggucgaggaugaccggcugcuuagacugagccagaagaaauucugugcuggaggcuccuaugugggggaagauugcccucaauggauggugcccaucacgauuucuacaagcgaggacccuaaccaggccaagcucaagauccugauggauaaacccgagaugaauguuguccugaagaacgugaaaccggaccagugggugaaacuuaaucucggaaccgucggcuuuuaccgcacccaguauuccagcgccaugcuggaaucucugcucccuggcauucgggaucugucccuuccucccguggacagacuggggcuccaaaacgaucuguucagccuggcucgcgcgggaaucauuucuacaguugaggugcuuaaggucauggaagccuucgugaaugagcccaacuacaccguuugguccgaccucagcuguaaucugggcauccuguccacacuccugucucacacggacuuuuaugaagagauccaggaguucgugaaggaugucuuuagcccgauuggggaacggcuuggaugggaccccaagccuggcgaggggcaucuggaugcucuccugagaggccuggugcuuggaaaacucggcaaggccgggcacaaagccacccuggaagaggcucgccggagauucaaggaccacguugaaggaaaacagauccuguccgccgaucuccgcucucccguguaccugacaguccuuaagcauggcgacgggaccacacuggauauuaugcucaagcugcacaaacaggcggacaugcaagaggagaagaaccggaucgaaagagugcugggagcuacccuucucccugaucugauucagaaagugcugacguuugcccucagcgaggaaguccggccccaggacaccguuuccgugaucggcgggguggccggcggaagcaagcauggccgcaaagcugccuggaaguucauuaaagauaauugggaggaacuguacaacagauaucaagggggauuucuuaucucucggcugaucaagcucuccgucgagggcuucgcgguggacaagauggcuggggagguuaaagccuuuuucgaaagccacccugcccccucugcugagagaacaauucagcagugcugugaaaauauccugcugaacgccgcuuggcuuaagcgcgaugccgaguccauucaucaguaccugcuccagcggaaagcgagcccgccuaccguguga

SEQ ID NO: 3439 - RNA, 660 nt, Artificial Sequence
  AAH65513 variant
augcugagagccggcgcucccaccggggaccucccucgggccggagaggugcacacaggcacgaccaucauggcggucgaguucgaugggggaguugugaugggcagcgacucccgcgugucugcuggggaggccgucgugaacagaguuuuugauaagcugagcccgcuucaugaacggauuuacugcgcccuguccggaucugcugccgacgcucaggccguggcggauauggccgcuuaucaacucgagcugcacggcaucgaacuugaggagcccccucugguccucgccgcugccaaugugguucgcaacauuagcuacaaauauagagaagaccuguccgcgcaucugaugguggccggcugggaucagcgggaagggggacaggucuacggcacacucgggggaaugcugacccgccagcccuucgcuaucggcgggucuggaagcacauuuauuuauggcuacguggacgccgcuuauaagccuggcaugucccccgaagaguguagacgguucaccacagaugccaucgcccuugcuaugagccgcgacgggucuuccggaggcgugaucuaccuggucaccauuacggcggccgggguugaucacagagugauccucggaaaugagcugccuaaauuuuacgacgaauga

SEQ ID NO: 3440 - RNA, 345 nt, Artificial Sequence
  EAW82312 variant
auggccggccuggcucuccagcccgggaccgcccugcuuugcuacagcuguaaggcgcaaguguccaacgaggacugccugcaggucgaaaauuguacacagcucggagagcagugcuggacggcuagaauccgggccguuggccugcuuaccgugauuucuaaaggguguagccugaacugcguggaugacucccaagauuauuacgucggaaagaaaaauaucacauguugcgacaccgaucucuguaacgccucuggcgcucacgcccugcagccugcugccgcgauucuggcccuccugccggcucuugggcugcuccuguggggacccggccagcuuuga

SEQ ID NO: 3441 - RNA, 372 nt, Artificial Sequence
  AAC39607 variant
augaaggccgugcugcucgcucugcuuauggccggccuggcgcuccagcccgggaccgcucugcuuugcuacagcuguaaagcccaagucuccaacgaggacugccugcagguugaaaauuguacacagcucggagagcagugcuggacggccagaauccgggcugugggccugcugaccgugauuucuaagggguguagccucaacugcgucgaugacucccaagauuauuacgugggcaaaaagaauaucacauguugcgacaccgaucuguguaacgccucuggagcucacgcccuucagccugcggccgcuauucuggcccuccugccggcucuugggcugcuccuguggggacccggccagcuguga

SEQ ID NO: 3442 - RNA, 963 nt, Artificial Sequence
  AAG40776 variant
augagcuccugcaacuucacccacgccacauuugugcugaucggcauucccgggcucgagaaggcucauuucugggugggauuuccucugcuuucuauguacguuguggccauguucggcaauuguaucguggucuuuauugugagaacggaacggagccugcacgcgccgauguaucucuuccugugcaugcuugcugccaucgaccuggcccucuccaccucuacaaugcccaaaauucuggcucuguuuugguucgauagccgcgagaucuccuuugaagccugucucacccagauguucuuuauccaugcucugucugccauugagagcacaauccuucuggcgauggccuucgacagauacguugcuauuugccacccucuccggcaugccgcugugcugaacaauaccgucacagcccaaaucgggauuguggcgguugugcgcggaucccuguuuuucuucccccuuccucuccugaucaagagacuggccuuuugucacagcaacguccucucucacuccuauugcgugcaucaggaugugaugaaacuggcuuacgccgacacccuucccaaugucguuuauggccugacggcuauucuccuggugauggggguggaugucauguucaucagccuuucuuacuuucugaucauucggaccgugcuccagcugccuuccaagagcgaacgcgccaaagccuucggaacauguguuucucacaucggcgugguccuggcuuuuuaugugccgcucauuggccuguccguugugcauagauucgggaacagccuucaccccaucguccggguggucaugggagacauuuaccugcuccugccucccgugaucaauccuaucauuuacggcgcgaagaccaagcagauccgcacaagaguucuugccauguuuaaaauuuccugcgauaaggaccugcaagcugucgggggaaaauga

SEQ ID NO: 3443 - RNA, 2253 nt, Artificial Sequence
  AAA60209 variant
auguggaaccugcuccacgagaccgacagcgccguggcuacagccagacggccccgcuggcugugcgcgggcgcucuuguccuggccgggggauucuuucuccugggcuuccuuuuugggugguucaucaaguccucuaaugaagccacgaacauuaccccuaaacauaauaugaaggcuuuucuggaugagcucaaagccgaaaacaucaagaaauuccuguacaauuuuacacagauuccgcaccuggcuggaaccgagcaaaacuuccagcucgccaagcagauccagagccaauggaaggaauuuggccuggacuccguugagcuugcgcauuaugaugugcugcucucuuaccccaauaaaacacacccuaacuauauuagcaucaucaaugaggacgggaacgaaauuuucaauaccucccuguuugagcccccucccccuggauacgaaaacgugucugauaucgucccgcccuucagcgccuuuuccccucagggcaugcccgagggcgaccuuguguauguuaauuacgcuagaacagaggauuucuucaagcuggaacgggacaugaaaauuaacuguagcgggaagaucgugauugcccgcuauggaaaagucuuuagaggcaauaaggugaagaacgcucagcucgccggggcgaaaggaguuauccuguacucugauccugccgacuacuucgcucccggcgugaaguccuauccggauggguggaaccugccuggaggcggcguccagcgggggaauauucucaaccugaauggagccggcgacccccuuaccccuggguaccccgcuaacgaguaugccuaccgcagaggaaucgccgaagcugugggccugcccagcaucccugugcauccgauuggguauuacgaugcgcaaaaacuccuggagaagaugggaggcucugcucccccugacuccagcuggcggggcucucuuaaaguccccuauaauguugggccuggauuuacgggcaacuucuccacccagaaggugaaaaugcacauccacagcacaaaugaagugacccgcauuuacaacgucaucgggacacugagaggagccguggagcccgaccgguacguuauucucggcgggcaucgcgauuccuggguguuuggcggaaucgacccgcagucuggcgccgccgucgugcacgagaucguucggagcuucgggacccugaagaaggaaggauggagaccucgcagaacgauucuguuugcuuccugggaugccgaggaguucggccuccuggggagcacagagugggcggaagaaaauucucggcuucugcaggagagaggaguggcuuauaucaacgccgacuccagcauugaaggcaauuacacccuccgcgucgauugcacaccccugauguauucucuugugcauaaccugaccaaagagcucaagagcccugacgaaggguuugagggcaaaucccuguacgaaucuuggaccaagaaaagccccuccccugaguucagcggaaugccccggaucucuaagcugggcuccgggaaugauuuugaggucuucuuucaaagacucggaauugccagcggccgcgcucgguauacaaagaacugggaaacgaauaaauucucuggguacccgcuguaucacuccguguacgagaccuacgaacuuguugagaaguucuaugacccuauguuuaaauaccaccugacaguggcccaggucagaggaggcaugguguucgagcucgcuaacagcaucguucugcccuuugauugucgcgacuaugccgugguccugcggaaguacgcggauaaaaucuauuccauuucuaugaagcauccccaggaaaugaagaccuacagcguguccuucgacucucuuuuuagcgccgugaaaaacuucacagagaucgcuuccaaguuuagcgaaagacuccaagacuucgauaaaucuaauccuauuguucugcgcaugaugaacgaccagcugauguuucucgagcgggccuucaucgauccgcuggggcuucccgacagaccuuuuuaucgccacgucauuuacgcucccuccagccauaauaaguacgccggcgaaucuuucccuggaaucuaugaugcgcuguuugacauugaguccaaaguggaucccagcaaggccuggggcgaggugaagcggcagaucuacgucgcugccuucaccgugcaggcugccgccgaaacgcucucugagguugcuuga

SEQ ID NO: 3444 - RNA, 3921 nt, Artificial Sequence
  CCDS1397.2 variant
augaccauguaccuguggcucaagcugcuugccuucggcuuugcuuuccuggacacagagguguuugucacggggcagagccccaccccuuccccgacaggacucaccacagccaaaaugcccucuguuccucugagcuccgauccccuuccuacccacacaaccgcguucucucccgcuagcacguuugaaagagagaacgacuucuccgaaaccacaaccucucugagcccugauaauacauccacccaagugagcccggacucucucgauaacgccuccgccuuuaauacgacaggcgugagcucuguccagacaccccaucugccuacccacgcugacucccagacccccagcgccgggaccgauacacagacguucucuggauccgcugccaacgcgaagcugaauccuacccccggcagcaacgccaucuccgacgugccgggggagcggucuacagcuagcaccuuuccuacagaucccguuuccccucucaccacgacacugagccuugcccaucacucuuccgcugcccugcccgcgcgcaccagcaauaccacaauuaccgccaacacaucugacgcuuaucucaaugccagcgaaacgaccacacugucccccucuggaagcgcugugaucuccaccacaaccauugccacgaccccuagcaaaccgacaugcgaugagaaguacgccaacaucaccgucgacuaucuuuacaauaaagagacaaagcuguucaccgcuaagcucaacgugaaugaaaacguugaguguggcaauaacacgugcacaaacaaugaagugcauaaccugaccgaguguaaaaaugcgucugucuccauuagccacaacucuugcacagcccccgauaagacccugauccucgacgugccucccggcguggagaaauuucaacugcacgacuguacccaggucgaaaaggcugauacaacgaucugccuuaaauggaagaauauugagaccuucacaugugacacccagaacaucacauauagauuucagugcgggaauaugauuuucgauaacaaggaaaucaaacuggagaaucucgaaccugagcaugaguacaagugugacuccgaaauucuguauaacaaucacaaauucaccaacgccagcaagaucauuaaaacggauuuuggaucccccggcgagccgcaaaucaucuucugccggucugaagccgcucaucaggggguuauuacauggaauccuccccagcgcagcuuucacaacuucacccuuuguuacaucaaggagaccgaaaaagacugccugaaucucgauaagaaccugauuaaguacgaccugcagaaccucaaaccuuauacaaaguacgugcugucccuucacgccuauaucauugcgaaagugcaaagaaauggaucugcugccaugugccauuuuaccacaaagagcgcucccccuucccaggucuggaacaugacggugagcaugaccucugauaauuccaugcacguuaaaugucggcccccgcgcgacagaaacggcccucaugagcgguaccaccuggagguggaagccgggaauacacucguccgcaacgagagccauaagaauugcgauuucagagugaaggaccugcaguauucuaccgacuacacauuuaaagccuauuuccacaacggagauuaccccggcgaacccuuuauccuucaccauuccaccagcuacaauucuaaggcucugaucgccuuccucgcguuucugauuaucguuacgagcauugcccugcucgugguccuguauaaaaucuacgaccuucacaagaaacgguccuguaaccuggaugagcaacaggaacucguggagcgcgacgaugagaagcagcugaugaaugucgaaccuauucaugcugacauccugcuugagaccuauaagagaaaaaucgccgaugaaggccgccucuuccuggcugaguuucagagcauuccgcggguguucucuaaguuccccaucaaagaggccagaaagccuuuuaaccaaaauaaaaaccgguacguugacauucugcccuaugauuacaauagaguggaacucuccgagaucaacggggacgcgggaagcaacuauauuaaugccuccuacaucgauggcuucaaggaaccucgcaaguacauugcugcccaggggccccgggacgagacagucgaugacuuuuggagaaugaucugggaacagaaagcuaccgugaucguuauggugacacgcugcgaggagggaaaccggaauaagugugccgaauauuggccuucuauggaggaaggcaccagagccuucggggacgucguggugaaaauuaaccagcacaagcgcugccccgauuacaucauucaaaaacugaauaucguuaacaagaaagagaaggcuacaggacgggaagucacccacauucaguuuacgagcuggccggaccauggcgugccugaggauccccaccuucugcucaagcugagacgccgggugaaugcguucuccaacuuuuucucuggcccuaucgucgugcauuguagcgccgggguuggaagaacaggcaccuauaucgggauugacgcuaugcuggagggacuugaagccgagaauaaaguggaugucuacggcuaugugguuaagcuccgccggcagagaugccugauggugcaggucgaagcccaauacauccugauucaccaggcucucguggaguauaaccaguuuggggaaaccgagguuaaucuguccgagcuucaucccuaccugcacaacaugaaaaagcgggacccgccuucugaacccagcccucucgaggccgaguuccagcgccugcccuccuacagaagcuggcggacacaacacaucggcaaucaggaagagaacaaaucuaagaauagaaacuccaacgugauucccuaugauuacaaucgcgucccucugaagcaugaacuugagaugagcaaagaaucugagcacgacuccgaugaaagcucugacgaugacuccgauagcgaggagccguccaaguauaucaacgcgagcuuuaucaugucuuacuggaaacccgaagugaugauugcugcccagggaccucucaaggagaccaucggcgacuucuggcaaaugauuuuucagcggaaagugaaggucaucguuaugcugacggaacugaagcauggggaccaggagauuugugcccaguauuggggagaaggcaaacaaacauacggggauaucgagguggaccucaaggauaccgacaaaagcuccacauauacccugagaguguucgagcuucgccacucuaagagaaaagauagccggacagucuaccaguaccaguauaccaauugguccguggaacagcugcccgcugagccuaaggaacucaucucuaugauucaaguugugaagcagaaacugccccagaagaacagcuccgagggaaauaaacaucacaagucuacgccucugcuuauccacugccgcgacggcagccagcaaaccgggauuuucugugcccuccugaaccugcucgaauccgcggagacagaggaagucguggauaucuuucagguugugaaagcucugagaaaggcccggccgggcauggucagcaccuucgagcaguaccaauuucuuuaugacgugauugccucuacauaccccgcucagaauggacagguuaaaaagaacaaucaucaggaagauaagaucgaguucgacaacgagguggauaaagucaagcaagacgccaauugcgugaacccucugggcgcucccgaaaaacucccugaggccaaggaacaggcggagggguccgaacccaccagcggaacggagggcccggagcacucugugaaugggccugccucccccgcucugaaccagggaagcuga

SEQ ID NO: 3445 - RNA, 624 nt, Artificial Sequence
  AAH02977 variant
auggccaagaccuacgacuaucuguucaaacuccugcuuaucggcgauagcggggugggaaagacaugcguccuguuuagauucuccgaggacgcuuuuaacucuacguucauuagcaccaucggcauugauuuuaaaauccggacaauugaacucgacgggaagcgcaucaaacugcagaucugggauaccgccggacaagagagauuccggacaauuaccacagcguacuaucgcggcgcuauggggaucaugcuuguuuacgacauuaccaaugaaaaguccuuugauaacaucagaaauuggauucggaacaucgaggaacacgccucugccgacguggagaagaugauucugggaaauaaaugugaugugaacgacaagcgccaggucagcaaagagagaggcgaaaagcucgcucuggauuauggcaucaaauucauggagacguccgccaaggcuaauaucaacguggaaaaugccuuuuucacccuggcgcgggacauuaaggccaaaauggauaagaaacucgaggggaacucuccccagggaagcaaucagggcguuaagaucacaccugaccaacagaaacgcuccagcuuuuucagaugcgugcugcuuuga

SEQ ID NO: 3446 - RNA, 1260 nt, Artificial Sequence
  BAA81688 variant
augaagaacuacaaagccaucggcaagauuggggagggaaccuucagcgaagugaugaaaaugcagucccugagagacggcaauuauuacgcuugcaagcaaaugaaacagcgguuugagucuaucgaacaggucaacaaucuccgcgagauucaggcccugagacggcuuaacccccacccuaauauccugaugcuccaugaaguuguguucgaucgcaagagcgggucccuggcgcuuauuugugagcugauggacaugaacaucuaugagcucaucagaggacggcgcuacccgcugucugaaaagaaaauuaugcacuauauguaccaacugugcaagagccucgaucauauccacagaaauggcauuuuucaucgggacgugaaacccgagaacauccugauuaagcaggauguccuuaaacugggggacuucggauccugucgcucuguguauagcaagcagccuuacacagaauacaucuccacgagaugguaucgggcucccgagugccuccugaccgauggcuuuuacacauauaagauggaccuuuggagcgccggcuguguuuucuacgagauugccucucugcagccucucuuucccggggugaaugaacuggaucaaaucuccaaaauccacgacgucauuggaaccccugcucagaagauccugacaaaauucaagcagagccgcgccaugaacuuugauuucccguuuaaaaagggcucugggauuccccuccugaccacaaaucuuuccccucagugccugagccuccugcacgcuaugguggccuaugaccccgaugagagaaucgcggcccaucaagcccuucagcacccuuacuuccaggaacaacggaaaaccgagaagcgcgcucugggaucucauagaaaggcuggcuuucccgaacacccgguugccccugagccccucuccaacagcugucagauuuccaaagaggggcggaagcagaaacagucucugaagcaagaagaggacagaccuaaacgccggggacccgcguaugugauggaacugcccaagcucaagcugagcggcgucgugagacuuuccagcuacucuuccccuacgcugcagagcgugcucggcucugggaccaauggacgcgucccgguucugcggccccuuaaaugcaucccugccagcaagaaaacagacccccagaaggaucugaaaccugcuccccagcaauguagacucccgaccaucgugcgcaagggcgggcgguga

SEQ ID NO: 3447 - RNA, 1389 nt, Artificial Sequence
  AAH08727 variant
auggccagcaacuccucuagcugccccaccccuggcgggggacaccugaauggcuacccggugcccccuuaugcuuucuuuuucccucccaugcucgggggacugucucccccuggcgcccuuacaacgcugcagcaucaacucccggucuccggguacagcacccccuccccugcgacaaucgagacccagucuagcuccagcgaagagauuguucccucuccucccuccccgccuccccugccuagaaucuauaagcccuguuuugugugccaggacaaaagcucuggauaccacuauggcguguccgcuugugaaggcugcaagggguucuuucggcgcagcauucagaaaaacauggucuacacaugucauagagauaagaauugcaucauuaacaaagugacccggaaucgcugucaauauugcagacuucagaaguguuucgagguuggaaugucuaaggaauccgugcggaacgaccgcaauaaaaagaaaaaggagguccccaaaccugagugcagcgaauccuacacacugaccccggaggugggcgaacucaucgagaagguuagaaaggcccaccaggagacguuucccgcccugugucagcuggggaaauacaccacaaacaauucuagcgaacaacgggugucccucgauaucgaccugugggauaaguucagcgagcuuucuaccaaaugcauuaucaagacagucgaauuugcuaaacagcugccuggauucaccacgcucacaauugccgaccagaucacccugcuuaaggcugccugccuggauauucucauccugcgcauuuguacaagauauacccccgagcaggacaccaugacauuuuccgauggccugacgcucaaccggacccaaaugcauaaugcgggguucggaccucugacagaccuuguguuugccuucgcuaaccagcugcucccccuggaaauggaugacgccgagaccggccuucugagcgcuaucugccucaucuguggcgaucgccaggaccuggagcaaccggacagaguggauaugcugcaggaaccucuccuggaggcccuuaaagucuacguucggaagcgcagacccucucggccucacauguuccccaagaugcugaugaaaauuacagaccucagaagcaucuccgcgaagggggccgaacgcgugauuacccugaaaauggagaucccuggaucuaugcccccgcuuauucaggaaaugcuggagaauagcgagggccucgauacgcuguccgggcagccuggaggcgggggacgggacggcggcgggcuggcucccccucccggaagcugcucuccgucccucagccccucuuccaacagaagcuccccugccacacacucucccuga

SEQ ID NO: 3448 - RNA, 570 nt, Artificial Sequence
  AAB02605 variant
augaccgaguacaagcugguggucguuggcgccgggggagugggcaaaagcgcucucacaauccagcugauucaaaaccacuucguggacgaauaugaucccacgaucgaggacuccuacagaaagcaggucgugauugauggggaaaccugccuucuggacauccucgauacagccggacaggaggaauauucugcgaugcgggaccaguacaugcgcaccggcgagggguuucuguguguuuucgcuauuaacaacacaaagagcuuugaggauauccaucaauauagagaacagaucaaacgggugaaagacuccgaugacgucccuauggugcuuguuggaaauaagugcgaucuggccgcccgcaccguggagucuagacaggcucaggaccucgcccggagcuacggcauuccguauaucgaaacauccgcuaagacccgccaaggcgucgaggaugccuucuacacgcuggugagagagauucggcagcacaaacugcgcaagcucaaucccccugacgaaucugggcccggauguaugagcugcaaaugugugcuguccuga

SEQ ID NO: 3449 - RNA, 570 nt, Artificial Sequence
  AAB59445 variant
augaccgaguacaagcugguggucguuggcgccgggggagugggcaaaagcgcucucacaauccagcugauucaaaaccacuucguggacgaauaugaucccacgaucgaggacuccuacagaaagcaggucgugauugauggggaaaccugccuucuggacauccucgauacagccggacaggaggaauauucugcgaugcgggaccaguacaugcgcaccggcgagggguuucuguguguuuucgcuauuaauaacacaaagagcuuugaggauauccaucacuauagagaacaaaucaaacgggugaaagacuccgaggaugucccuauggugcuuguuggaaauaagugcgaccugccgucucgcaccguggauacaaagcaggcccaggaccucgccagaagcuacggcauucccuucaucgaaaccuccgcuaaaacgcggcagcgcgucgaggaugccuuuuauacccuggugagagagauucggcaauaccgccugaagaaaaucucuaaggaagagaaaacaccuggcugugugaagauuaagaaaugcaucauuauguga

SEQ ID NO: 3450 - RNA, 570 nt, Artificial Sequence
  AAA60255 variant
augaccgaguacaagcugguggucguuggcgccgggggagugggcaaaagcgcucucacaauccagcugauucaaaaccacuucguggacgaauaugaucccacgaucgaggacuccuacagaaagcaggucgugauugauggggaaaccugccuucuggacauccucgauacagccggacaggaggaauauucugcgaugcgggaccaguacaugcgcaccggcgagggguuucuguguguuuucgcuauuaauaacagcaaauccuuugccgauaucaaucuuuauagagagcaaaucaagcgggugaaagacucugaugacgucccuauggugcugguuggaaacaagugcgaucucccgacacgcaccguggacacaaagcaggcccaugaacuggcuaaaagcuacggcauucccuucaucgagaccuccgccaagacgagacagggcgucgaagaugcuuuuuauacccuggugcgggagauucgccaguacagaaugaaaaagcucaauucuagcgacgacgggacacaaggauguaugggccugccuugcguggucauguga

SEQ ID NO: 3451 - RNA, 546 nt, Artificial Sequence
  AAB84001 variant
augugcaagggccuggccgcucucccccacagcugucuggagagagccaaagaaaucaagauuaaacuugggauccugcuccagaagccugacuccgugggagaucuggucauuccguacaacgagaaacccgaaaagccugcgaagacccaaaagacaucucuugacgaggcucugcaguggcgggauagccucgacaagcugcugcagaauaacuauggccucgccuccuucaaaucuuuucugaaaagcgaguucuccgaagagaaucuugaauuuuggaucgccugcgaggauuacaaaaagauuaagucucccgcuaaaauggccgaaaaggcuaaacagaucuaugaggaguucauccaaacggaagccccuaaggagguuaacauugaccauuuuaccaaagauaucacaaugaagaaucugguggaacccagccucuccagcuucgacauggcgcagaaacgcauucacgcccugauggagaaggauucucuuccuagauuugugcgguccgaguucuaccaggaacugaucaaguga

SEQ ID NO: 3452 - RNA, 2175 nt, Artificial Sequence
  CCDS4362.1 variant
augagcuuccccaaggccccucugaaaagauuuaacgacccguccggcugcgcucccucuccuggggccuacgaugugaagacccucgagguccugaaaggacccguuagcuuccagaagucccaacgguuuaaacagcagaaggaaucuaagcagaaucuuaacguggacaaagauacaacgcugccugcgagcgcucgcaaggugaaauccucugagagcaaggaaucccaaaagaaugacaaggaucucaagauccuggagaaagaaauuagaguccuucugcaggagcggggcgcccaggaccgcagaauccaggaucucgagaccgaacuggagaagauggaagcccggcugaacgcugcccuccgcgagaaaacaagccugucugcuaauaacgccacccuugagaagcaacugauugaacucacaagaaccaaugagcugcuuaaauccaaguucagcgaaaacgggaaucagaaaaaccugcggauccucucucuggagcugaugaagcuccgcaauaagagagaaacaaaaaugcggggaaugauggcgaagcaggagggcauggagaugaaacuucaggugacccaacgcucccuggaagagagccaggggaagauugcccagcuggaaggaaaacucguuucuaucgagaaggaaaagaucgacgagaaauccgagacggaaaagcugcuugaguauauugaagagaucagcugugcuuccgaucaaguggaaaaauacaagcuggacauugcccagcucgaggagaaccugaaagaaaagaaugaugagauccugucucucaagcagagccuggaagagaacauugucauccuuuccaaacagguggaggaccugaauguuaagugccaacuccuggaaaaagagaaggaagaucacgugaacagaaaccgggagcauaaugaaaaccuuaaugcugagaugcagaaccugaaacagaaguuuauucucgagcagcaagaacgcgagaagcugcagcagaaagaacugcagaucgacagccuccugcaacaggagaaggaacuuucuuccagccugcaccagaaacucuguucuuuccaggaggagauggucaaggaaaagaaucuguuugaggaggaacugaagcaaacccuugacgaacucgauaaacugcagcagaaggaggagcaagccgaaagacuggugaagcagcucgaggaagaggcgaaaagccgggccgaggaacugaaacuucuggaggaaaaacucaagggcaaagaggcugaacuggagaaguccucugccgcucauacacaggccacccugcuucuccaggagaaguaugacagcauggugcaaucccuggaagaugucacagcccaguucgagagcuacaaagcucugaccgcgucugaaaucgaggaccucaagcuggaaaacuccagccuucaggagaaagccgcuaaggccggcaaaaaugccgaggauguucagcaccaaauucuggcuacggaaucuuccaaccaggaguaugugagaaugcuccuggaccugcagacaaagagcgcccuuaaggaaaccgagaucaaagaaauuacaguguccuuucuccagaagaucaccgaucugcaaaaucagcugaaacagcaagaggaggacuuccgcaagcagcucgaagaugaggaagggcggaaagcggagaaggagaacaccacagcugaacugacggaggaaauuaauaaguggagacuucuguacgaggaacucuauaacaaaaccaagcccuuucagcugcagcuggacgccuucgaggucgagaaacaagcccuucucaaugaacauggagcugcccaggagcagcugaacaagauccgcgauucuuacgcuaaacugcucggccaccagaaucugaagcagaaaaucaagcacgugguuaaacuuaaagacgaaaacagccaacugaaguccgaggugucuaaacuccggugccagcuggccaagaaaaagcagagcgaaacaaagcugcaagaggagcuuaacaaaguccuggggauuaagcauuuugacccuuccaaagcguuccaccaugaaagcaaggagaauuucgcccucaaaaccccgcugaaggaaggaaacacaaauuguuacagagcucccauggagugccaggaaucuuggaaguga

SEQ ID NO: 3453 - RNA, 582 nt, Artificial Sequence
  AAC33179 variant
auggccgcuaucagaaagaaacuggugauugucggcgacggggccugcggaaagaccugucuccugaucguuuucagcaaagaucaguuucccgagguguacgugccuacagucuucgaaaacuauauugcggacaucgagguggauggcaagcaaguugaacuugcucugugggacacggccgggcaggaggauuacgaccggcuccgcccgcuguccuaucccgauaccgacgugauucuuaugugcuuuucuaucgauagcccugacucccuggaaaauauccccgagaaauggacaccugaggucaagcacuucugucccaacgugccuauuauccucguuggaaauaagaaagaucugagacaggacgaacauacccggcgcgagcuggccaagaugaaacaggaaccggugagaucugaggagggccgggauauggcuaaccgcauuagcgccuuuggguaccucgaaugcuccgcuaagacaaaagagggagucagagaaguguucgagauggccacccgggcgggccugcaagugcgcaagaauaagagacggcgcggcugucccauccuuuga

SEQ ID NO: 3454 - RNA, 888 nt, Artificial Sequence
  AAA36161 variant
augagcggcgcccuggacgugcuccagaugaaggaggaagauguccugaaauuccuugcugccgggacccaccugggaggcacaaaccucgacuuucaaauggagcaguacaucuauaagagaaaauccgaugggauuuacaucauuaaucugaagcggacgugggaaaaacuucugcucgcggcucgcgccaucguugccauugagaaccccgcugacgugucugugaucagcuccagaaauaccggacagcgggccguccugaaguucgcugccgcgacaggcgccaccccuaucgcugggcgcuuuacaccgggaaccuucacaaaccagauucaagccgcuuuuagagaaccccggcugcucgugguuaccgauccucgcgccgaccaucagccccugacggaggcgucuuaugugaaucuuccuaccaucgcccugugcaacacagauagcccccucagauacgucgacauugcuaucccuuguaauaacaagggcgcccacuccgugggccugaugugguggaugcuugcucgggagguucugcgcaugagagggaccauuucucgggaacauccgugggaggugaugcccgaucucuauuucuaccgcgacccugaagagaucgagaaagaggaacaggccgccgcugaaaaggcggucacaaaagaggaauuucagggagaguggaccgcccccgcuccugaguucacggccacacaacccgaaguggccgauuggagcgagggcgugcaggucccguccguuccuauucagcaguuucccaccgaagacuggagcgcucaaccugccacagaggauuggucugcggcucccaccgcccaggccaccgaaugggugggggcuacaacggacugguccuga

SEQ ID NO: 3455 - RNA, 2601 nt, Artificial Sequence
  AAH14614 variant
augaacggcgagcagcaacuggacgccgaugcugggagcggaauggaagagguggaacucuccugggaggacuaccuggaagagaccggcucuacagccguccccuaugggagcuucaagcacguugauacgagacuucagaauggauuugcgccuggcaugaaacuggagguggcugugcggaccgacccggaaacauacugggucgccaccgugaucacaaccugcgagcagcuccugcuucugcgcuaugauggguacggagaagacagacgggccgauuucuggugugacauucgcaaggcugaucucuaucccaucggcuggugcgagcagaacaaaaagacacuggaggccccugaaggcauuagagacaaaguuuccgauugggacgaguuucugcggcaaacccucaucggggcuuguucucccccugugccccugcuugaaggacugcgcaauggcagaaacccucucgaucugauugccccggggagccggcuugagugccaggcguuccaggacucccugucuacguggaucgucaccgugguugaaaauaucggaggccgccucaagcugagauacgaggggcuggagagcuccgacaacuaugaacauuggcucuacuaccuggaucccuuucuucaccaugugggaugggccgcucagcaaggcuaugagcugcagccucccagcgccauucggcaccucaagaaugaagcugaguggcaggaaauccuggccaaagucaaggaggaggaagaggaaccucuucccucuuaccuguucaaagacaaacaggugauuggcauccauacauuuuccgugaacaugaagcucgaggcggucgauccguggagcccuuucgggauuucucccgccaccguugugaagguguuugacgaaaaguauuuccuggucgagauggaugaccugcgcccugagaaucacgcuagacgguccuuugugugucacgccgauagccccggaaucuuccccguucaauggucucucaaaaacggccugcauauuuccccuccgcccggguacccuagccaggacuuugauugggcugacuaucuuaagcagugcggagccgaagccgcuccccaacgcuguuucccuccccugaucuccgagcacgaguucaaagaaaauaugaagcucgaggcggugaacccgauccugccugaagaggucugcguggccacaauuaccgcuguuagaggcucuuaccuuuggcugcagcucgaagggagcaaaaagcccaucccugaguguauuguguccgucgaaagcauggauaucuuuccccugggauggugcgagacgaauggccauccucugucuacaccccggagagcccgcguguauaaacagcggaagauugccgucgugcagccggagaagcaaguuccuuccagcagaaccgugcacgaaggccuccgcaaccaggagcuuaauucuacagaaagcgucaugaucaacgggaaauacuguugccccaagaucuacuucaaccaccggugcuuuuccggacccuaucuuaauaaaggcagaauugcugagcugccucaguguguggggccgggaaacugcguucucgugcugcgcgaaguccugacccuucucaucaaugccgcguacaagcccucucgggugcugagagagcugcagcucgacaaagacagcguguggcauggcuguggggagguucugaaggcuaaguauaaaggcaaguccuaccgcgccaccgucgaaauugugaaaacagccgaucgggugacggaguucugcagacaaaccuguaucaagcuggaaugcuguccuaaccuguuuggaccccgcaugguccucgacaaaugcagcgagaauuguucugugcugacaaagaccaaguauacacacuacuauggcaaaaagaaaaacaagcggauugggagaccucccggaggccauuccaaucuggcuugcgcccuuaaaaaggcuagcaagcggcgcaaaagacggaagaacguuuucgugcacaaaaagaaaagaucuuccgccagcgucgauaauaccccugcggggucuccccagggauccggcggggaagacgaggaugacccggaugagggcgacgaugacagccucuccgaaggaucuacgagcgagcagcaggaugaacugcaagaggaguccgaaaugagcgagaagaaaucuuguuccagcucuccuacacaguccgaaaucagcaccucucugcccccugaccgccagcggagaaagcgcgagcucagaaccuuuagcuucuccgaugacgaaaacaagcccccgagcccuaaagagauccggauugagguggccgaacgccugcaucuugacucuaauccccugaagugguccguugcugauguggucagauuuauccggagcacagacugcgccccucucgcucgcauuuuccuggaucaggagaucgacggccaagcccugcuucuccugacccugcccacagugcaggaaugcauggaucucaaacuggggcccgcgauuaaacuuugucaccacaucgagagaauuaaguuugccuucuacgaacaguuugcuaacuga

SEQ ID NO: 3456 - RNA, 1431 nt, Artificial Sequence
  CCDS4550.1 variant
augagcggcuccucugccagaagcucccaccugucucagcccguggucaagagcguucucguguaccggaacggggacccuuucuaugcuggacgcagaguggucauccaugagaaaaagguguccucuuuugaaguuuuccugaaagaggugaccggcgggguccaagccccguuuggagcggugcggaauauuuacacaccccgcacgggccacagaauccggaaacuugaucagauucagagcgggggaaacuauguugcuggcggccaggaagccuucaaaaagcugaauuaccucgacaucggggagauuaagaaacgcccuauggaaguggucaacaccgaggugaagcccgugauccauuccagaaucaaugucagcgcccgguuucgcaaaccucugcaagagcccugcacaauuuuccuuaucgcuaacggagaucugauuaauccugccucuagacuccugaucccgcggaagacccugaaccagugggaccacguucuccagauggugacagaaaagauuacccugcgcuccggcgcugugcauagacuuuauacacuggaggggaagcucgucgaaagcggagccgagcuggagaauggccaguuuuacguggcgguugggcgggauaaguucaaaaagcugcccuauucugaacuucucuuugacaaauccaccaugcgcagaccuuucggacaaaaggccagcucucugcccccuaucgugggcucccggaaaagcaagggcuccgggaacgauagacacucuaaaagcacggucggauccagcgacaauucuagcccccagccgcugaagcgcaagggcaaaaaggaggaugugaacuccgaaaaacucaccaagcugaaacagaauguuaaacuuaagaacucucaggagacaauuccuaauagcgacgaagggaucuuuaaggcuggagccgagcgguccgagaccagaggcgcugccgaagugcaagaggaugaagacacacaggucgaggugcccgucgaucagcgcccugcggaaaucguggacgaggaggaagacggggagaaggccaacaaagaugcugaacaaaaggaggacuucucuggaaugaacggcgaucuggaagaggagggcgggcgggaagccaccgacgcucccgagcagguugaagagauucucgaucacagcgagcagcaggccagacccgcccgcgugaauggaggcacggacgaagagaacggggaggaacugcaacaggucaauaacgaacuucagcuggugcucgauaaagagcggaagucccagggagcuggcagcgggcaagacgaggcggauguugacccucagagaccgccccgcccugaagugaagaucacaucucccgaggaaaaugagaacaaucagcagaacaaagauuacgccgcugucgccuga

SEQ ID NO: 3457 - RNA, 1362 nt, Artificial Sequence
  BAA07903 variant
augagaauccccguggacgccagcaccucccggcgcuucacaccuccgucuacggcucugagccccggcaagauguccgaggcccucccucugggggcgcccgaugcuggagccgcccuugcuggcaaacugagaucuggggaccggagcauggucgaaguucucgccgaucacccuggagagcuggugcgcaccgacucccccaacuuucuuugcucugugcugccuacacauuggagauguaauaagacccucccgauugcuuucaaagucguggcccugggcgauguucccgacgggacacuggugaccgucauggcgggaaacgaugaaaauuacagcgccgagcuccggaacgcuacagccgcuaugaagaaucagguggcccgcuuuaacgaccugagauucguuggccgguccggccgcgggaaaucuuuuacccuuacgaucaccguguucacaaauccuccccaagucgcgaccuaucacagagccauuaagaucacaguggauggaccucgggaaccccgcagacaucggcagaagcuggacgaucagaccaaaccgggcagccucuccuuuagcgagcgccugucugagcuugaacagcugagacggacggcuaugagaguguccccucaccaucccgccccuacacccaacccccgcgcuagccucaaucacucuaccgccuucaacccucaaccgcagucccagaugcaggacacacggcaaauucagcccagcccucccugguccuacgaucagucuuaucaguaccuggggagcaucgccuccccuagcguccaccccgcuaccccgaucucuccugggagagcguccggcaugaccacacugagcgccgagcucucuagccgccuguccacggcucccgaccuuaccgccuuuucugacccucggcaauuccccgcccugccuagcauuuccgaucccagaaugcauuauccgggggcuuuuacauacagcccuacccccguuacaucuggaaucggcauuggcauguccgccauggggagcgcgacccgcuaucacacguaccugcccccuccguaccccggaucuucccaggcucagggcgggccuuuccaagccagcucccccucuuaucaucucuacuauggagccagcgcuggcuccuaccaguuuucuauggugggaggagaacggagcccucccagaauccuuccucccugcacaaaugccuccaccggcagcgcucugcucaacccgucucugccuaaucaguccgacguggucgaggccgagggcagccacucuaacucccccaccaauauggcgccuagcgcccgccuggaagaggcuguguggcggcccuauuga

SEQ ID NO: 3458 - RNA, 1080 nt, Artificial Sequence
  ACI46041 variant
augccccuggagcucgaacugugcccuggcagaugggugggaggacagcacccguguuucaucauugccgagaucggccaaaaccaucagggggaccuugaugucgcuaagcggaugauucgcauggccaaagaaugcggagcggacugugcuaaguuucagaaaagcgagcuggaguucaaguuuaauagaaaagcccucgagcggcccuacaccuccaagcacucuuggggcaagacauauggggagcauaaacgccaccuggaguucagccaugaucaguacagagaacuucaacgguaugccgaagagguuggaaucuuuuucacggcuuccggcauggacgagauggccguggaauuucugcacgagcucaacgugccuuucuuuaaggucggcucuggggauaccaauaacuuccccuaccuggagaaaacagcuaagaaaggacgcccuauggugauuagcuccggcaugcagucuauggacaccaugaagcagguuuaucagaucgugaagccccugaauccuaacuuuugcuuccuccaauguacaagcgccuacccgcugcagcccgaagaugucaaucuuagagugaucuccgaauaucagaaacuguuuccugacauucccaucggguacagcggacacgagaccggcauugcgaucucuguugccgcuguggcccucggggcuaagguccuggagcggcauauuacacuugauaaaaccuggaagggauccgaccacagcgccucucuggaaccuggcgagcucgcggaacuggugcgcuccgugagacuggucgagcgggcccucggcagccccacgaaacagcugcuuccgugcgaaauggcuuguaacgagaagcuggggaaaucuguuguggccaaggugaagaucccugagggaaccauucucacaauggauaugcugaccgucaaagugggcgaacccaaggcuuacccucccgaggacaucuucaaucuuguugggaaaaaggugcuggucacaguggaagaggaugacaccaucauggaagaacucguugacaaccaugggaaaaagauuaaguccuga

SEQ ID NO: 3459 - RNA, 2715 nt, Artificial Sequence
  CCDS14652.1 variant
augcaggccagcccccugcaaaccucccagccuacaccgcccgaggaacuccacgcugccgcguacguguucacgaacgacggccagcagaugagaucugaugaggucaaucugguugcuaccgggcaccaaagcaagaaaaagcacucccggaaaucuaagcgccauagcuccucuaaaagacggaaaagcauguccagcuggcuugacaagcaggaagaugccgccgugacacacucuaucugcgaggaacgcauuaacaauggacagccuguggcugacaacguccuguccaccgcucccccuuggcccgaugccacaaucgcccauaauauuagagaggagcggauggaaaacggccagagccgcaccgacaaagugcucucuacagcgccuccgcaacugguucacauggccgcugccgggauccccuccaugagcaccagagaucuucacucuacggugacccauaauauucgggaggaacgcauggagaacggacagccucagcccgacaauguccuguccacaggcccuaccgggcucaucaacauggcugccacacccaucccggcgaugagcgccagagaucuguaugcuaccgugacgcacaauguuugugagcagaagauggaaaacgugcaaccugcccccgacaauguccugcucacacugcggccucgcagaauuaacaugaccgauacaggaaucucccccaugucuacccgggaccccuacgcuaccauuacauauaaugugccugaggaaaagauggagaagggccagccgcagcccgauaacauccuuagcacggccuccaccggccugauuaacguggccggggcuggaaccccugcgaucagcaccaauggccucuacucuacagucccccauaacguuugcgaagagaaaauggagaaugaccaaccucagcccaacaaugugcuguccaccgugcagccggucauuaucuaucuuacggccacagggaucccuggaaugaacacccgcgaccaguacgcuaccauuacacacaaugugugugaagagagaguugugaacaaucaaccccugccuagcaacgcccucucuaccguccugcccggccuggccuaucucgcuacagccgauaugccugcgaugagcacgcgggaccagcacgcuaccaucauucauaaucugagagaagagaagaaggauaacucccagcccacaccggacaaugugcuuucugccguuaccccugaacugaucaaccucgccggggcuggcauuccucccaugagcacacgcgaucaguacgccaccgugaaucaccauguccacgaggcucggauggagaacggacaaagaaaacaggacaacgugcuguccaauguccuuagcggccugaucaacauggccggggcgucuauccccgccauguccagccgcgaucucuacgcuacgauuacccauucugugcgggaagagaagauggaauccggaaaaccgcagacagacaagguuaucagcaaugaugcuccccagcugggccacauggccgccgggggcauuccuuccaugucuaccaaagaccuguaugcgacagugacccaaaacguccacgaggaaagaauggagaauaaccagccccagccuagcuacgaucucuccacggugcugcccggacuuacauaucugaccguugccgggaucccugcuaugucuacacgcgaccaguacgccaccgugacccauaauguccacgaggaaaagauuaaaaacggacaagcugccagcgacaauguguuuuccacagugcccccggccuucaucaacauggcugcgacgggcguuagcucuauguccacccgggaucaguaugccgcugucacacauaauaucagagaggaaaagauuaacaauagccagccugcccccggcaacauccucucuaccgccccucccuggcugcgccacauggcugccgcggggauuuccagcacaaucacccgggaccuuuacgugacggcuacacacucugugcaugaggagaagaugaccaauggacaacaggccccggauaacagccuguccaccgucccucccggcugcauuaaccucagcggggccggaaucucuuguagauccacacgcgaccuguaugcuaccgugauucacgauauccaggaagaggaaauggagaaugaccagacaccucccgauggcuuucugagcaacuccgacucucccgaacucaucaauaugacggggcauugcaugccuccgaacgcccuggauagcuucucccacgacuuuaccucucuuagcaaagaugagcugcucuacaagcccgacuccaaugaguucgcgguuggcaccaaaaacuacucugugagcgcuggagauccucccgucacagugaugucccugguugaaacagugccuaauacaccccaaauuagcccugccauggccaagaaaaucaacgacgacauuaaguaucagcugaugaaggagguccggagauuuggccagaauuacgaacggaucuucauucuucucgaggaagugcaggggucuaugaaaguuaagcgccaauuuguggaguucacgaucaaagaggcugccagauuuaagaaagucgugcugauccagcagcuggaaaaggcucucaaggagauugauucccauugucaucugcggaaagugaagcacaugagaaaacgcuga

SEQ ID NO: 3460 - RNA, 2403 nt, Artificial Sequence
  AAH01058 variant
augggcagcuccaagaaacacagaggggagaaggaagccgcuggaaccacagccgcggcuggcaccgggggagccacggagcagcccccucggcaucgcgaacacaaaaagcauaaacacagaucuggcgggagcggaggcuccggcggggagcggcgcaagagaucucgggaacgcggaggcgagagagggagcggacggcgcggcgccgaggcugaagccagauccucuacacaugggcgggagcgcagccaagcugaaccguccgagagacgggugaagcgcgagaaaagagacgauggauacgaagccgcggccagcucuaagaccuccagcggcgacgcuucuucccugagcaucgaggaaacaaacaaacuccgggccaagcugggccuuaaaccccuggaggucaaugcuauuaagaaggaagccgggaccaaagaggagccuguuacagcggaugugaucaaccccauggcccucagacagcgcgaagaacugcgggaaaaacuugcugccgcuaaagagaagagacugcucaaucagaaacugggaaagauuaaaacccugggcgaagacgauccuuggcucgacgauacggccgccuggaucgagcgcucucggcagcugcaaaaggagaaggaccuugcugaaaagagagcgaagcugcucgaggaaauggaucaggaguucgggguguccacccuggucgaagaggaguuuggacagcgccggcaggaccuuuauagcgccagagaucugcaaggccucacaguggaacacgcuauugacuccuuccgcgagggggaaaccaugauccugacacugaaagauaagggaguucuccaggaggaggaagacgugcuggucaacgugaaucuuguugacaaagagcgggccgaaaagaacguggagcugagaaagaaaaagcccgauuaccucccuuaugccgaagacgagucugucgaugaccuggcucagcagaaaccgcgcagcauccuuuccaaguacgaugaggaacuggagggcgaacggccccacagcuuuagacucgagcaaggcgggaccgccgacggacugcgggaacgcgagcuggaggaaauuagagcgaaacuccggcugcaggcucagucucuuuccacggugggcccuagacuggccagcgaguaucucacacccgaagagauggugaccuucaagaagacaaaacgccgggucaagaaaaucagaaagaaagaaaaggagguuguggugcgcgccgaugaccugcuuccucugggggaucaaacccaggacggagauuuuggcucuagacuccgggggcgcggcagacggcgcgucagcgagguggaagaggaaaaggagcccguuccgcagccucugcccuccgacgacaccagaguggagaauauggauauuucugacgaagaggaaggaggcgcuccuccucccgggagcccccagguccuggaggaagaugaggccgagcucgaacugcaaaaacagcuugagaagggacggcgccugagacagcuccagcaacugcagcagcugcgggacuccggcgaaaaagugguugagaucgugaagaaacuugaaagccgccagagagggugggaggaggaugaagacccggagcggaagggagcuauugucuucaacgccacaucugaauuuugcagaacgcucggcgagauccccaccuacgggcuggcgggcaaucgcgaggagcaagaggaacugauggauuucgagcgggacgaagagagauccgccaacggaggcagcgagucugauggggaagagaauauuggaugguccacagugaaccucgacgaagagaaacagcagcaggauuuuagcgcuuccucuaccacaauccuggacgaggaaccuaucgucaaucgcggccuugccgcugcccugcuccugugucaaaacaaggggcugcuugagaccacggugcagaagguugcgcgggugaaagcccccaauaagagccucccuuccgcugucuauugcauugaagauaaaauggccaucgacgacaaguacucuagacgcgaggaauaccggggauucacacaggauuuuaaagagaaggacggcuauaagcccgaugugaaaauugaauacguugacgagaccgggagaaagcugaccccgaaagaggcuuuccgccaacugagccaucgguuucacggcaagggauccggcaaaaugaagacagaaagacggaugaagaaacucgaugaggaagcccugcuuaagaaaaugucuagcuccgacaccccucuggggacaguggcccuccugcaggagaagcagaaagcucagaagacgcccuauaucguccugagcggaucuggcaaguccaugaacgcgaacaccauuacaaaauga

SEQ ID NO: 3461 - RNA, 2877 nt, Artificial Sequence
  AAF00087 variant
augagaacccacacacggggcgcccccagcguguucuuuaucuaccugcucugcuucgucuccgcuuauauuacggacgagaacccugaaguuaugaucccguuuaccaaugccaacuacgauucucaucccaugcuguauuucagccgcgcggagguggcugaacuucagcugagagccgccuccucucacgagcauauugcugcccggcucacagaagcugugcacaccaugcugagcuccccucuugaguaccugcccccuugggaccccaaggauuauucugcccgcuggaaugagaucuuugggaacaaucucggagcgcuggccauguucuguguccuguacccugaaaacauugaggcuagagacauggccaaagauuauauggaacggauggcugcccaaccgagcuggcucgugaaggacgcgcccugggaugagguuccucuggcccauucccuugugggcuuugcuacagccuacgacuuccuguacaauuaucucagcaaaacccagcaggagaaguuucuggaagucaucgcuaacgccucuggguacauguaugagacauccuaccgcagaggauggggcuuccaguaucuucacaaucaccaacccaccaacugcauggcccugcucacggggagccuggugcugaugaaucagggauaccuccaggaggcuuaucuguggaccaaacagguucuuacaaucauggaaaagucucuggugcuccugcgggaagucaccgauggcucccuuuacgagggcguggcguacgggagcuauacaacccgcucucuguuucaauacauguuccucgugcagagacauuuuaacauuaaucacuucggacauccuuggcugaagcagcacuucgccuuuauguaucggacgauccugcccggcuuccagcgcacagucgcuauugccgacuccaacuacaauugguuuuaugggccggagagccaacucguuuuccuggauaaauuugugaugagaaacggauccggcaacuggcuugccgaccagauccggcgcaauagaguggucgaagggccuggaacccccucuaagggccagcggugguguacacugcacaccgaguuccucugguacgauggcagccugaaauccgugccuccucccgacuuugggacccccacacuucauuauuucgaagacuggggaguugugacguacggcagcgcucugccggccgagauuaacagaucuuuucucuccuucaagagcgggaaacugggaggccgcgcgaucuacgauauuguccaccggaauaaguauaaggacuggaucaaaggguggagaaacuuuaaugcuggacaugaacaccccgaucaaaacucuuucaccuuugccccuaauggcgugcccuucaucacagaggcccuguacggcccuaaguauaccuucuuuaacaauguucucauguucagccccgcuguguccaaaucuugcuuuagcccgugggucggacaggugacagaggacuguuccagcaaguggucuaaauacaagcaugaucuggccgcuuccugccaggggcgcgucguggccgcggaagagaaaaacggcguuguguucauuagaggggaaggagucggcgccuauaauccucagcuuaaccugaagaaugugcaacggaaccucauccugcugcacccccagcuucuccugcugguugaccagauucaccucggggaggaaagcccucuggagaccgcugccagcuuuuuccauaauguggauguccccuuugaggaaacggugguggacggcguucacggagcuuucauccgccagcgggauggccuuuacaagauguauuggauggacgauacaggguacuccgagaaagccaccuuugcgagcgucaccuacccuagaggauaucccuacaacggcacaaacuaugugaaugugaccaugcaucugcgcuccccgauuacacgggccgcuuaccucuucaucgggccuucuaucgacguccaaucuuuuacggugcacggagacucccagcagcuggauguuuucauugccaccucuaagcacgcuuaugccacauaccuguggaccggcgaagccacagggcagagcgcuuuugcgcaagugaucgccgacagacauaaaauucuuuucgaucgcaacuccgcuaucaagagcucuauuguccccgaggugaaagacuaugccgccaucguugagcagaaucuccagcacuucaagcccguguuucagcugcuggaaaagcaaauccucucccgggucagaaacaccgcuagcuuccggaaaacggccgagcgccugcuuagauuuucugauaagcggcagaccgaagaggcgauugacagaaucuucgcuauuucccagcaacagcagcagcaaagcaaaucuaagaaaaaucgccgggccggcaagagauacaaguuuguggaugccguuccugacaucuucgcucagauugaagugaacgagaaaaagauccgccagaaagcccagauucuggcgcaaaaggagcucccgaucgaugaagacgaggaaaugaaagaucugcuggacuuugcugaugucacauacgagaagcauaagaauggaggccuuaucaaagggagauucggacaggcccggauggugaccacaacccacagccgcgcccccucccucagcgcuucuuauacgagacuguuucugauucucaacaucgccauuuucuuugugaugcuggcuaugcagcuuacauacuuccagcgggcccaaucccugcauggccagcgcugucucuaugcgguccugcugaucgacagcugcauucuucucuggcuguacuccucuuguagccagucccaaugcuga

SEQ ID NO: 3462 - RNA, 2892 nt, Artificial Sequence
  AAH93784 variant
auggccaccgcugccgagacaagcgcguccgaacccgaggcugaaucuaaggccggcccuaaagccgacggggaggaagaugaggugaaggcugccagaacgcggcgcaaaguccugagcagagcuguugccgcggccaccuacaagacaaugggaccggcuugggaccagcaagaggaaggcguguccgagucugauggggacgaauaugccauggcuagcuccgccgagucuagccccggagaguacgaaugggaguaugaugaagaggaagagaaaaaccagcucgagaucgaacggcuggaggaacagcuuuccauuaauguguacgacuauaacugccacgucgaucugauccgccuccugagacuugagggcgaacugaccaaggugcggauggcgcgccagaagaugagcgagauuuucccucucacagaggaacuguggcuggaguggcuccaugacgaaaucucuauggcccaagaugggcuggacagagagcacguuuacgaucuuuuugaaaaagcugugaaggacuauauuugucccaauaucuggcuggaguacggacaguacuccgucggcggcaucgggcagaaaggaggccucgagaaggugcggagcguuuucgaacgcgcccugucuuccguggggcuucauaugaccaaaggacuggcucucugggaggccuauagagaauuugagagcgccauugucgaggcugcgcggcuggaaaaggugcacucucuguuccgcagacagcucgccaucccucuguacgauauggaggcuacauuugccgaauaugaggaaugguccgaggaccccauuccugagagcgugauccaaaacuacaauaaggcccuucagcagcuggaaaaauauaagccguacgaggaagcucuccugcaggccgaggcgccccggcuugcugaauaucaagccuacauugacuucgagaugaaaaucggcgauccugcccgcauucagcugaucuuugagagagcucucgucgaaaacugccugguucccgaccuguggauccgguacucccaguaucucgauagacaacugaaggugaaagaccuugugcugucuguccauaaucgcgccauucggaacuguccuuggaccguggcucucuggagcagauaccugcuugccauggagcgccacgggguugaucaccaggugaucuccgucacguucgaaaaggcgcugaaugccggauuuauucaggcuaccgacuauguggagaucuggcaggccuaccucgauuaucugcggagacgcguugacuucaaacaagauagcucuaaggaacuggaggagcuccgggcugccuuuacaagagcgcuggaauaccuuaagcaggagguggaagaacgcuucaacgaguccggcgaccccagcugcgucauuaugcagaauugggcccggaucgaagcuagacuguguaacaauaugcagaaagcccgcgagcucugggauucuaucaugacccggggcaacgcuaaguaugccaauauguggcuggaauacuacaaccuggagagagcccauggggacacacaacacugccggaaagcccuucaucgcgcggugcaguguaccagcgacuauccggaacacgucugcgaggugcuccugacgauggagagaacagaaggaucccuggaggauugggacauugccguucagaagaccgaaacacggcucgcuagagugaacgagcagcgcaugaaagccgccgaaaaggaggcugcccugguccaacaggaggaagagaaggcggaacagcggaaaagagcucgcgccgagaagaaagcccuuaagaaaaagaagaaaaucagaggcccugaaaagcgcggggcugaugaggacgaugagaaagaauggggagacgaugaggaggagcagcccucuaagcggagacggguggagaauagcauuccugccgcgggcgaaacccaaaacguugagguggcugccgggcccgccggaaaaugugcugccgucgacguggaacccccuuccaagcagaaggagaaagcugccagccugaagcgcgauaugccgaaagugcuccacgacucuuccaaggauagcaucaccguuuuugucucuaaucugcccuacuccaugcaggaaccugacacaaaacugagaccccuuuucgaggcgugcggcgagguggugcaaauucggccuaucuucagcaaccgcggcgauuuuagaggguauuguuacgucgaguucaaggaagaaaaauccgcccuccaggcucuggagauggaccggaagucuguggaaggacgccccauguuuguuagcccgugcguggacaaguccaaaaauccugauuucaaggucuuuagauauucuacgagccuggagaaacauaaacucuucaucuccggccugcccuuuagcugcaccaaggaggaacuugaggaaauuuguaaggcccacgggacagugaaggaccugcggcucguuaccaacagagcuggaaaaccuaagggccuggccuacguggaguaugaaaaugagucucaggccucccaggcugucaugaaaauggaugggaugacaaucaaggagaacauuaucaaaguggcgauuagcaaucccccucaacgcaagguucccgaaaagccggagacccggaaagccccuggcggacccaugcugcuuccccagacguacggcgcuagagggaagggacgcacacagcucucucugcugccucgggcccuccagagaccguccgccgcugcuccccaagcggaaaacggcccugcugccgcccccgcuguggccgcgccugcugccaccgaggcccccaaaaugagcaaugcugacuucgccaagcuguuucuucgcaaauga

SEQ ID NO: 3463 - RNA, 2283 nt, Artificial Sequence
  AAC51668 variant
augaagaccugggugaaaaucgucuucggcguugccacaagcgcugugcuggcccuccuggugaugugcauuguccuuagacccucccgggugcacaacucugaggaaaauacgaugcgcgcgcugacccucaaggacauccugaacgggacauuuagcuacaaaaccuucuuuccuaauuggauuuccggacaggaguaucuucaucaaucugcugauaacaauaucguucuguacaacauugaaacaggccagagcuauaccauccucuccaauagaacaaugaagucugugaacgccagcaauuacgggcuguccccggaccggcaguucgucuaucuggagagcgauuacucuaaacucuggcgcuauuccuacaccgccacguacuauaucuacgaccugagcaacggagaauuugugagaggcaaugagcuuccccggccuauucaguaucuguguuggucucccguuggguccaagcucgcuuacguguaucaaaacaauaucuaccugaagcagcgcccuggagaucccccuuuccagauuaccuuuaacggcagagagaauaaaaucuucaacggcauuccggacugggucuaugaagaggaaaugcuugccacaaaguacgcucugugguggagccccaacgggaaauuucucgccuacgcggaguucaaugauaccgacaucccugugauugccuauucuuacuauggagaugagcaguacccccggacaaucaacaucccuuaucccaaggcuggcgccaaaaauccggugguccgcauuuuuaucauugacaccacguacccugcuuauguugggccccaagaagugccugugcccgccaugaucgcguccagcgauuacuacuucuccuggcugacaugggucaccgacgagagagugugccugcaguggcucaagcggguucagaacgugucuguccugagcauuugugauuuucgcgaagacuggcagacaugggacugccccaagacccaagagcacaucgaagaguccagaaccggaugggccggcggguucuucgugagcacaccuguguuuucuuaugaugcuaucuccuacuauaaaauuuucagcgacaaggauggauacaaacauauccacuauauuaaggacacgguugagaaugccauccagauuaccucuggcaaaugggaagcuaucaacaucuuucgggucacacaggauagccuuuucuacuccucuaaugaguuugaagaguauccgggccgcagaaacauuuaccggaucagcauuggguccuaucccccuagcaagaaaugugugaccugccaucugagaaaggaacgcugucaauacuacacagccucuuucuccgacuaugccaaguacuaugcucucgucugcuacggacccggcaucccuauuagcacccugcacgaugggcggacggaccaggagaucaaaauucuugaggaaaauaaggagcuggaaaacgcgcucaaaaauauccagcugcccaaggaggaaaucaaaaagcuggagguggaugagauuacacucugguauaagaugauccugccgccucaguuugacagaucuaaaaaguacccccuucugauucaaguuuacggaggcccuuguucccagagcgugcgcuccgucuucgccgugaacuggaucucuuaucucgcuagcaaagaagggaugguuauugcccugguggauggacggggcaccgccuuucagggcgacaagcuccuguacgcugucuauagaaaacucgggguguacgagguggaagaccagaucaccgccguucgcaaguucaucgagaugggauuuauugaugagaagcggaucgcgauuuggggcugguccuaugggggauacgucucuagccuggcucuggccuccggcacagggcuuuucaaaugcggcaucgccguggcucccgugagcucuugggaauauuacgccuccgucuacaccgagagauuuaugggacugccuacaaaggacgauaaucuugaacacuauaaaaacagcacggugauggcucgcgccgaguacuuccggaauguugacuaucugcucauucauggcaccgcggaugacaacgugcacuuccaaaacucugcccagaucgcuaaggcccuggucaaugcucagguggauuuucaggccaugugguacuccgaccaaaaccaugggcugagcggacuuucuacaaaucaccucuauacccacaugacacauuuccugaaacaguguuuuagccuguccgauuga

SEQ ID NO: 3464 - RNA, 1128 nt, Artificial Sequence
  CCDS32839.1 variant
auggacgcccugcagcucgcuaacagcgccuucgcgguggaucuguuuaagcaacuuugcgagaaagaaccccugggcaauguccucuucuccccuaucugucugucuaccagccuuucccuggcucagguuggggccaagggagacacagccaacgagauuggccaggugcuccacuuugaaaaugugaaagaugucccguucggguuucagacggugaccucugacguuaacaagcugagcuccuucuacucucugaaacucaucaagagacuguauguggauaagagccuuaaucuguccacagaguuuauuagcucuaccaaacggcccuacgcuaaggaacucgagacagucgacuucaaagauaagcuggaggaaaccaaaggacaaaucaacaauuccauuaaggaccuuacagauggccauuuugagaacauccuggccgacaauagcgugaacgaucagaccaagauccucguugugaaugcugccuauuucgucgggaaauggaugaagaaauuuucugaauccgagacgaaggagugcccuuuccgcgugaacaaaaccgacacaaagcccgugcagaugaugaauauggaagcgaccuuuuguaugggaaacauugauagcaucaauugcaaaauuaucgagcugccuuuccagaacaagcaccugucuauguucauucuccugcccaaggacgucgaagacgaguccacaggccuugagaaaaucgaaaagcaacugaacagcgagucccucucucaguggaccaauccuagcacgauggccaacgcuaaaguuaagcuguccauuccgaaauuuaagguggaaaagaugaucgaucccaaagccugucuugagaaucugggccucaagcauaucuucagcgaagacacaucugauuuuuccgggaugagcgagaccaaaggaguggcucugucuaacgucauucacaaggugugccuggaaaucacagaggacggcggggauagcauugagguuccuggagccagaauccuccagcauaaagacgaacugaaugcggaucaccccuucauuuacaucauccggcacaacaagacccgcaauauuaucuuuuucggcaaguuuuguuccccuuga

SEQ ID NO: 3465 - RNA, 1002 nt, Artificial Sequence
  AAH06564 variant
auggccugcagcagacccccuucccagugugagccgaccucucugcccccugggcccccugcuggccggcgccaccucccccugagcagacggcgcagagaaauguccucuaacaaggagcaacggagcgccguguucgucauccuuuuugcgcugauuacaauccucauucuguacuccucuaauagcgcuaacgaaguuuuccauuauggaucccuucgcggcagaagccggcgcccugugaaucugaaaaaguggucuaucacggacggguacgugccgauucucggaaacaaaacccugcccuccagaugccaccagugugucaucgugucuagcuccagccaucugcucggcacaaagcuggggccugagaucgaacgggccgagugcaccauucgcaugaaugaugcccccacaaccggauauucugcugacguuggcaacaaaacaaccuacagaguggucgcccacuccagcguguuucggguucuucgcagaccucaggaguucgugaaucggacgcccgaaaccgucuuuaucuucuggggcccgccuuccaagaugcagaagccccaagggucucuggugagagugauucagcgcgcuggacucgucuuuccuaacauggaggccuaugcgguuagccccggccggaugagacaguucgaugaccuguuucgcggggaaacaggaaaagaucgggagaagucccauagcuggcuuucuaccggcugguucacaauggugaucgccguggagcugugugaccacguccacguguacgggaugguucccccuaauuauugcucccagagaccgcgccuccaacggaugcccuaccauuacuaugaaccuaaaggacccgaugagugugugaccuacauucagaacgaacacagcagaaagggcaaucaucaccgcuuuaucacggagaaacgggucuucucuagcugggcucagcuguauggcauuacauuuucccacccuucuuggaccuga

SEQ ID NO: 3466 - RNA, 1071 nt, Artificial Sequence
  AAC37586 variant
augagccccugcggcagagcccggcgccagaccuccagaggggcuauggccgugcuggcguggaaguucccucggacacgccucccgaugggagcuucugcccugugugucguugugcuuugcuggcuguacaucuuucccguguauagacucccuaacgagaaagaaauuguccaaggcgugcugcagcaggggacggccuggcggcgcaaucagaccgcugccagagcuuuccggaagcaaauggaggacuguugcgaucccgcccaccuuuuugcgaugacaaaaaugaacagcccuaugggaaaguccaugugguacgacggcgaguuccuguauucuuuuaccaucgauaauagcacauacucccucuucccccaggccaccccuuuucagcugccgcugaaaaagugugcuguuguggggaacggaggcauucucaagaaaucuggcugcgggcgccagaucgacgaagccaauuucgucaugagauguaaccugcccccucuuagcuccgaauauacaaaggaugugggaagcaaaucucaacugguuaccgcuaaucccuccauuauccggcagcgcuuucagaaccuccuguggagcagaaagacguucguggacaauaugaaaaucuacaaccauucuuauauuuacaugccugccuuuuccaugaagaccggcacagagcccagccuucgggucuacuauacccugucugaugugggggcgaaucagacaguccucuucgccaacccgaauuuucugcgcuccaucggaaaguucuggaaaagcagaggcauucacgcuaagcggcuguccaccggacucuuccuggugucugccgcucuugggcugugcgaggaaguugccaucuacggcuuuuggccuuucagcgugaacaugcaugagcaacccauuucccaccauuauuacgacaaugugcucccuuuuagcggcuuccacgccaugcccgaagaguuucugcagcuuugguaucugcacaaaaucggggcucucagaaugcagcuggaucccugugaggacacgucucugcaaccuacauccuga

SEQ ID NO: 3467 - RNA, 1257 nt, Artificial Sequence
  BAG50894 variant
augagaaccaaggccgcuggcugcgccgaacggcgcccccugcagccuagaacagaagcggcugccgccccggcugggcgggccaugcccagcgaguacacguaugugaaacuccgcuccgacuguucuagaccuagccugcaaugguacacccgggcucaguccaagaugcgcagacccucucuucugcucaaagauauccugaagugcacacuucuggucuucggaguuuggauucucuauauccugaaacugaacuacaccacagaagagugugacaugaagaagaugcacuauguggauccugaccaugugaaacgggcccagaaguacgcgcagcaaguccuccagaaagaaugccgccccaaguuugccaaaaccagcauggcucugcuuuucgagcacagauauuccguggaucugcucccuuuuguucagaaggccccgaaggacucugaggcugaaagcaaauacgaucccccuuucggcuuucggaaguucuccagcaaagugcagacacugcuugagcugcuccccgaacaugaccugccugagcaccugaaggccaaaaccugucgcagaugcgucgugauugggucuggaggcauccuccaugggcuggagcuuggacacacgcugaaucaauuugauguugugauucggcucaacuccgcgcccgucgaaggcuacagcgagcacgugggcaauaagaccacaauccgcaugaccuauccggaaggggccccucugucugaccuugaguacuauuccaacgaucuguucguggcuguccucuuuaaaagcguugacuucaauuggcugcaggccauggugaagaaggaaacacugcccuuuugggugagacucuucuuuuggaaacaggucgcugagaagaucccucugcagcccaaacauuuccggauucuuaaccccgugaucauuaaggagaccgccuucgauauccugcaauacucugaaccucaguccagauuuuggggacgcgacaaaaauguuccgacgauuggcgugaucgccgucgugcucgcuacacaccugugugacgagguuagccuugcgggguucggauaugaucugaaccagccccggaccccucuccauuacuuugacucccaaugcauggccgcuaugaauuuccagacaaugcacaacgugaccaccgaaacaaaguuucugcugaagcucgucaaagagggcguggucaaggaucugucugggggaauugacagagaguucuga

SEQ ID NO: 3468 - RNA, 1059 nt, Artificial Sequence
  EAW56837 variant
auggacuuccugagaaaccucuuuagccagacccugucccuuggcucucaaaaggagcggcugcucgaugaacugacacuugaggggguggcccgcuacaugcagagcgaaagaugccggcgcgucaucugucugguuggagcuggcauuuccacgucugccgggauccccgacuucagaagcccuuccaccggacucuaugauaaucuggagaaauaccaucugccguaucccgaagcgauuuuugagaucucuuacuucaagaaacacccugagcccuuuuucgcucucgccaaggaacuguauccuggccaguuuaaacccacaauuugccacuacuucaugcggcuucugaaggacaaggggcuccugcuucgcuguuauacccagaacaucgauacacuggagagaaucgccggacucgaacaagaggaccugguggaggcucauggcaccuuuuacacaagccacugcguguccgccagcugucggcaugaauacccucugucuuggaugaaagagaagauuuucuccgaagucaccccgaaaugcgaggauugucagagccucgugaagcccgacaucguguuuuucggcgaaucucugccugcucgcuuuuucuccugcaugcagagcgauuuccuuaaaguugaccugcuccuggucauggggacgucucuucaggugcaacccuuugccucccugauuagcaaggcgccucucuccacccccagacugcugaucaauaaggagaaagccggacagucugauccguuccucggcaugauuauggggcugggaggcgggauggacuuugauagcaagaaagccuaucgggacguugcuuggcuuggagagugugaccagggcugccuggcucucgccgaacugcuuggcuggaagaaagagcuggaagaucucgugcgcagagagcacgcguccaucgacgcccagagcggggcuggagucccuaaccccucuacauccgccagcccuaagaaaucucccccucccgcuaaggaugaagcccggaccacagagcgcgagaagccgcaauga

SEQ ID NO: 3469 - RNA, 1170 nt, Artificial Sequence
  AAD40850 variant
auggccgagcccgacccuagccacccgcuggaaacccaggcuggcaaggugcaagaggcccaggauuccgacucugauagcgaagggggagcggcuggcggggaggccgacauggauuuccucagaaaccuguuuucccagacacuuucucugggaagccagaaagaacggcuccuggacgagcuuacgcuggagggcgucgcccgcuacaugcaauccgaaagaugccggcgcguuaucugucucgugggggcuggaauuucuaccagcgccggcauccccgauuucagauccccuagcacaggccuguaugacaaucuggagaaguaccaucuccccuauccugaagcuauuuuugagaucucuuacuucaaaaagcaccccgagccguuuuucgcccuggcgaaagaacuuuauccugggcaguuuaagcccaccauuugccauuacuucaugcggcugcucaaggauaaaggacugcuucugcgcuguuauacacagaacaucgacacccucgagagaaucgccggccuggaacaggaggaucugguggaagcucacgggacauuuuacaccucccauugcgucagcgccucuugucggcacgaguacccucucuccuggaugaaggagaaaauuuucagcgaagugacgcccaagugcgaggacugucaaucucugguuaaaccugauaucguguuuuucggagaaucccuucccgcucgcuuuuucagcugcaugcaguccgacuuccugaaggucgaccuccugcuugugaugggcaccucucugcagguucagccguuugccagccucauuuccaaggcgccucugagcacacccagacugcucaucaauaaagagaaggccgggcaaucugauccuuuccugggaaugauuaugggccuuggcgggggaauggacuuugauuccaaaaaggcuuaucgggacguggccuggcugggcgaaugugaucaggggugccucgcucuggccgagcuucugggauggaaaaaggagcucgaagaccugguccgcagagagcacgccagcaucgaugcucagucuggcgcgggggugcccaaccccagcaccuccgccucuccuaaaaagagcccgcccccugcuaaggacgaagcccggacaaccgagcgcgaaaaaccccaauga

SEQ ID NO: 3470 - RNA, 1401 nt, Artificial Sequence
  AAH02824 variant
auggccgaggaacaggaccugagcgagguggaacucucccccgucggcucugaggaaccuagaugccugagcccgggguccgcucccucucuuggaccugauggcgggggaggcgggagcggacugcgggccucccccggcccuggcgagcucgggaagguuaaaaaggagcaacaggacggagaagcggaugacgauaaauuccccguguguauccgcgaggcugugucucagguccugagcggcuacgacuggacccuugugccuaugccgguuagagugaacggggccuccaagagcaaaccccacgucaagcggccuaugaaugccuuuauggugugggcucaggccgcucgcagaaagcuggccgaucaauauccccaucuccacaacgcggaacugucuaaaacacugggaaagcucuggcggcugcuuaaugaguccgacaaacgcccuuucauugaggaagccgagagacugcggaugcagcauaagaaagaucaccccgacuacaaguaucagccgcgcagacggaagaacggcaaagcugcccagggggaagcugagugcccuggaggcgaagccgagcaaggcgggacggcggccauccaggcucauuacaagagcgcccaccucgaucaccgccaucccggagagggcucuccuauguccgacgggaaucccgaacaccccagcggacagucucauggcccuccgacacccccuaccacccccaaaacagagcugcaguccgggaaggcugauccuaaaagagacggacggagcaugggcgaaggcgggaagccccacauugacuuuggaaacguugauaucggcgagauuucccacgaagugaugucuaauauggagaccuucgacgucgccgagcuugaucaauaucugccgccuaacgggcaucccggacacgugagcuccuacagcgccgcuggcuaugggcucggcucugcgcuggccguggcuuccggacauagcgccuggaucucuaaaccucccggcgucgcccugccuacaguuagcccgcccgggguggacgcuaaggcccaggugaagaccgaaacggcgggaccucagggcccuccccacuacaccgaucaacccuccacaucucagaucgcuuacaccagccucucccugccgcauuaugggagcgccuuucccucuauuucccgcccucaguucgacuacagcgaucaccagcccucuggaccuuauuacggccacuccgggcaagccagcggccuuuauuccgcuuuuucuuacaugggacccagccagagaccucuguauacagccaucuccgaccccucuccgagcggcccucagucccauagccccacccacugggagcagccugucuacacgacacucucucggcccuga

SEQ ID NO: 3471 - RNA, 456 nt, Artificial Sequence
  AAH32457 variant
augagcauccccuucuccaacacccacuaccggauuccucagggcuuugggaaucugcucgagggacugacaagagaaauccuucgcgagcaaccggacaacauucccgccuucgcugccgcguauuuugaaucucugcucgagaagagagagaaaacgaauuucgauccugcugaguggggcagcaagguggaggaccgguuuuacaacaaucaugccuucgaagaacaggaacccccugagaaauccgaucccaagcaggaggaaucucagaucagcgggaaagaggaagagaccuccgucacaauucuggacucuagcgaagaggauaaggagaaggaagagguugccgcugugaaaauccaagccgcuuuucgcggacacaucgccagagaagaggcgaagaaaaugaagaccaacucccuucagaaugaagagaaagaggaaaacaaguga

SEQ ID NO: 3472 - RNA, 294 nt, Artificial Sequence
  AAF28420 variant
auggacaagcagagcuccgccggcggggugaaaagaucuguccccugcgauagcaacgaggcuaaugaaaugaugccugagaccccgacaggagacuccgauccccaaccugcccccaagaaaaugaagacgucugaaagcuccaccauccugguugugcgguaccgcagaaacuucaaacggacaucuccugaggaacuccugaaugaccacgcgcgcgagaacagaauuaauccccuucagauggaggaagaggaauuuauggagaucaugguggagauuccugcuaaguga

SEQ ID NO: 3473 - RNA, 426 nt, Artificial Sequence
  AAH62750 variant
auggagcagcccaccagcuccacaaacggcgaaaagacgaaaucuccuugcgagagcaauaacaagaaaaaugacgaaaugcaagaggugccgaacagaguccuggcccccgaacagucccucaagaaaaccaagacaucugaguacccuaucauuuucguuuauuaccugcggaaggggaaaaagaucaauagcaaccagcuugagaaugaacagucccaagagaacucuauuaaucccauccagaaagaagaggaugagggaguggaccugagcgaaggcuccagcaacgaggaugaagaccucgggccuugugagggacccucuaaggaagauaaagaccuggauuccagcgaggggucuucccaggaggacgaagaucuuggccugagcgagggaucuucccaggacagcggcgaagauuga

SEQ ID NO: 3474 - RNA, 567 nt, Artificial Sequence
  AAH01003 variant
augaacggcgacgauaccuucgccaagagaccccgggacgaugcuaaagccagcgagaagcgcuccaaagcguuugacgauaucgcuacauacuucucuaagaaagaauggaagaagaugaaauauagcgagaagauuuccuacguguauaugaaaagaaauuacaaggccaugacgaaacugggguuuaaggucacccucccuccguucaugugcaacaagcaggccacagacuuucaaggaaaugauuucgacaacgaucacaaucggcgcauccagguugaacauccccagaugaccuuuggcagacugcaccggauuaucccuaaaauuaugcccaagaaaccugcugaggacgaaaacgauucuaagggggugagcgaggccuccggaccccagaaugacggcaaacaacuucauccuccggggaaggcuaacaucucugagaaaaucaauaagcgcagcggacccaagagaggcaaacacgccuggacacaucggcugcgcgaaagaaagcagcucgugauuuaugaggaaaucuccgauccugaggaggacgacgaauga

SEQ ID NO: 3475 - RNA, 567 nt, Artificial Sequence
  AAH16957 variant
augaacggcgacgaugccuucgcuagacggcccaccgugggggcccagaucccugagaagauucaaaaagcguuugacgauaucgcuaaguacuucagcaaagaagagugggaaaagaugaaagccuccgagaagaucuuuuaugucuacaugaagcgcaaauaugaagccaugacaaagcugggauucaaagcuacgcucccgcccuuuaugugcaauaagagagccgaggacuuccagggcaacgaucuggacaaugauccuaaccgggggaaucagguugagcgcccccagaugaccuuuggaagacuucaaggcauuucuccuaaaauuaugcccaagaagccugcugaagaggggaacgacagcgaagaggugccggaggccuccggaccccagaaugauggcaaagaacuguguccucccggcaagccuacaaccucugagaaaauccacgaacggagcgggcccaagcgcggagagcaugcguggacacacagacuccgggaacgcaaacagcuggugaucuacgaggagauuuccgacccggaagaggaugacgaauga

SEQ ID NO: 3476 - RNA, 567 nt, Artificial Sequence
  AAC05819 variant
augaacggcgacgauaccuucgccagacggcccacagugggggcucagaucccugagaagauucaaaaagccuuugacgauaucgcgaaguacuucagcaaagaagagugggaaaagaugaaagucuccgagaagauuguuuauguguacaugaagcgcaaauaugaagcuaugacgaagcugggauuuaaagccauccucccgucuuucaugagaaauaagcgggugaccgacuuucagggcaacgauuucgacaaugaucccaaccgcgggaaucagguccagagaccucaaaugacauuuggacggcugcagggcauuuuccccaaaaucaugccuaagaagcccgccgaggaggggaacgugagcaaagaaguuccugaggcuuccggaccgcagaaugacggcaagcagcuuugcccucccggcaaacccaccacaucugaaaagaucaacaugauuagcgggccuaaacgcggagagcacgccuggacccauagacugcgggagcgcaagcaacucgugaucuacgaagagauuuccgaucccgaagaggacgaugaauga

SEQ ID NO: 3477 - RNA, 567 nt, Artificial Sequence
  AAC05820 variant
augaacggcgacgaugccuucgcuagacggccccgcgacgaugcccagaucagcgagaagcugagaaaagcguuugacgauauugcuaaguacuucuccaaaaaggaaugggagaaaaugaagucuagcgaaaagaucguguaugucuacaugaaacucaauuaugagguuaugaccaagcugggguuuaaagugacacuuccuccguucaugcgguccaagcgcgccgccgacuuucacggaaacgauuucggcaaugacagaaaccaucggaaucaaguggaacgcccccagaugacguuugggucucugcagagaauuuucccuaaaaucaugcccaagaagccugcugaggaggaaaacggacucaaagagguccccgaagccagcggcccucagaaugaugggaagcaacugugcccgcccggaaacccuuccacccuugagaaaauuaauaagacaucuggccccaaacggggcaagcacgcuuggacccaucgccugagagagcggaaacagcucgugguuuacgaagagaucagcgacccugaagaggaugacgaauga

SEQ ID NO: 3478 - RNA, 888 nt, Artificial Sequence
  CCDS32420.1 variant
auggagcugauccaggacaccagcagacccccucucgaauacgugaagggcgucccgcugauuaaauauuucgccgaggcucuugggccccugcaauccuuucaggcccggccugaugaccuccugaucucuacauaccccaagagcggaacgaccuggguuucccagauucuugauaugaucuaucagggcggggaccuggaaaaaugccaccgcgcgccuauuuucaugagagugcccuuucucgaguucaaggcuccuggaaucccgucuggcauggaaacacugaaagauacccccgccccucggcugcucaagacacaucugccccuugcccugcucccucaaacccugcuugaccagaaggugaaagucguguacguugcucgcaacgccaaggauguggcugucagcuauuaccacuuuuaucauauggccaaagugcaccccgagccggggacaugggacuccuuccuggagaaguuuaugguuggagaagugucuuacggcagcugguaccagcauguccaggaguggugggaacucuccagaacccacccugugcuguaucuguucuacgaggauaugaaagagaaucccaagcgggaaauccaaaagauucucgaguuugugggccgcagccugccugaagagacggucgacuucguugugcagcacaccucuuuuaaagaaaugaagaaaaaccccaugacaaauuauaccacagugccccaggaguucauggaucauuccaucagcccuuuuaugagaaaggggauggcgggagacuggaaaaccacguucacagucgcccagaacgagcgguucgaugcugacuacgccgaaaagauggcuggcuguucucuuuccuuucgcagcgagcuguga

SEQ ID NO: 3479 - RNA, 3807 nt, Artificial Sequence
  CCDS43990.1 variant
augaucgccgcucccgagauuccuaccgacuucaaccugcuccaggaaagcgagacacacuuuuccucugauacggacuucgaagauaucgagggcaagaaucaaaaacaggggaagggaaaaaccugcaagaaaggcaagaaggggccggccgaaaaaggaaagggcgggaacggaggcggcaaacccccuagcgggcccaauagaaugaacggacaucaccagcagaauggcguggagaacaugaugcuguuugaggucguuaagauggggaaauccgcgaugcaaucugugguggacgauuggauugaaagcuacaagcaugaccgggauaucgcccuucuggaccucauuaauuucuuuauccaguguuccggaugcaagggcgucgugacagcugagauguuccgccacaugcagaacucugaaaucauuagaaaaaugaccgaggaguuugaugaagacagcggggauuauccucugacaauggccggaccccaguggaagaaauucaaguccagcuuuugugaguucaucggcguucuugugcggcaaugccaguacucuauuaucuaugacgaauacaugauggauaccgucauuucccugcucacaggccugagcgacucucaggugcgcgcuuuuagacauaccuccacgcuggccgcuaugaaacucaugaccgcccugguuaauguggcgcuuaaccugagcaucaauauggacaacacacagcggcaauaugaggccgaacgcaauaagaugauugggaaaagagcuaacgagcggcucgagcugcuucugcagaagcgcaaggaacuccaggagaaucaagaugaaaucgagaacaugaugaacgccaucuucaaaggagucuuugugcacagauaccgggacgcuauugccgaaauccgcgcgauuuguaucgaggagauuggcaucuggaugaagauguauucugaugccuuccugaaugacuccuaccugaaauacgugggguggaccaugcacgauaagcagggagaagucagacucaaaugccugacagcccuucagggccuguauuacaacaaggagcucaauagcaagcuggaacuuuucaccucccgguuuaaagaccgcaucguuucuaugacgcuggauaaggaguaugacguggcugugcaggcuauuaaacuccugacacugguccuccaaagcuccgaagaggugcugaccgccgaggauugugaaaacguuuaccaucuuguguauagcgcccacagaccugucgcuguggcggccggggaguuccuguacaagaaacucuuuucucggagagacccggaagaggauggaaugaugaagcgccggggcagacagggccccaaugcuaaccugguuaagacacuuguguucuuuuuccuggaguccgaacuccaugagcacgccgccuaucuggucgacagcaugugggacugcgcuaccgaacugcucaaagauugggaguguaugaauagccugcuucuggaagaaccucucagcggggaggaagcccugaccgaccgccaggaguccgcgcugaucgaaauuaugcuuugcacaauccggcaggcugccgagugucaucccccugugggaagaggcacggggaagcgcguccucaccgccaaagaaaagaaaacacaacuggaugaccggaccaagauuacagagcuguuugcuguggcccucccccagcugcuugcuaaguacucuguugaugccgagaaagugaccaaccugcuccagcugccgcaguacuucgaccuggaaaucuauacgacaggaagacuugagaagcaccucgaugcgcugcugcgccaaauccggaauauugucgaaaaacacaccgacaccgaugugcucgaggccugcagcaagacauaccaugcucugugcaacgaagaguuuaccaucuucaauagaguugacauuucccgcagccagcuuaucgaugagcuggccgacaaauuuaaccggcuccuggaagauuuccugcaggagggcgaggagccugacgaggacgaugcuuaucaggugcuuucuacacucaagagaauuacggccuuucacaaugcgcaugaccuguccaaaugggaucuguucgccuguaacuacaagcuccugaagaccgggaucgaaaauggcgacaugcccgagcaaauugucauccacgcccuucagugcacacacuaugugauccuguggcagcucgcuaaaauuaccgaaucuucuuccacaaaggaggaucugcugcggcuuaaaaagcaaaugcgcguguucugucagaucugccagcauuaccucaccaacguuaacacgaccgucaaagaacaggcuuuuacaauucugugugacauccugaugauuuucagccaccaaaucauguccggaggcagagauaugcucgagccucugguguauacccccgacucuagccuucaguccgagcugcucucuuuuauccuggaucauguguucauugaacaggacgaugacaauaacagcgccgaugggcagcaagaggacgaagccuccaagaucgaggcucugcacaagcggagaaaucuucuggcggccuuuugcaaacucauugucuacacagugguugaaaugaacaccgcugccgacaucuucaagcaguacaugaaauauuacaaugauuauggagacauuaucaaggagacgaugagcaaaacacgccagaucgauaagauucagugugccaagacccugauccucucucugcaacagcuuuuuaacgagaugauucaggaaaauggcuacaacuucgaccgguccagcucuacauuuuccgggaucaaagagcuggcuagacgcuucgcccucaccuuuggacuggaucaacugaagaccagagaagcgauugcuaugcuucacaaagacggcaucgaguucgccuuuaaggaacccaauccucagggggagagccauccgccccugaaccucgccuuccuggauauccucucugaguucagcuccaaacugcuucggcaggacaagcgcacaguguaugucuaccuggaaaaguuuaugacguuccagaugagccucagacgggaggauguguggcugccucugaugucuuaucgcaauucccuucuggcuggcggagacgaugacaccaugagcguuauuuccggcaucucuagcagaggguccacagugcggucuaaaaagagcaaacccuccaccggaaagcgcaaagucguggaaggcaugcaacucucucugacagaggagagcuccagcucugacuccauguggcucagcagagaacagacccugcacacgccuguuaugaugcagacaccccagcuuaccucuaccauuaugcgggagccgaagcgccugagaccugaagauuccuuuaugagcguguaccccaugcaaacagagcaucaccagaccccucuggacuacaacacacaggucacguggaugcucgcccagcggcaacaggaagaggcgagacagcagcaagagcgcgcugccaugucuuaugugaaacugcggaccaaucuucagcaugccaucagacgcgggacaucccugauggaagaugacgaggaacccauuguggaggaugucaugaugagcuccgaaggacggaucgaggaccucaacgagggcauggauuucgacaccauggauauugaccugccucccagcaagaauagacgcgaacggacagagcucaagccggacuuuuucgauccugcuucuaucauggaugaaagcguucuggggguguccauguuuuga

SEQ ID NO: 3480 - RNA, 1473 nt, Artificial Sequence
  CCDS5615.1 variant
auggagagcaucuccaugaugggcucucccaagagccuguccgaaaccuuccucccuaacgggauuaauggaaucaaagacgccagaaaggugacagucggcguuauugggucuggagauuuugcuaaaagccugacgauccggcuuauucgcugcggcuaccacguggugaucggguccagaaacccgaaguucgccucugaguuuuucccccaugucguggacguuacccaccaugaagaugcgcugacaaaaaccaauaucauuuuuguggcuauccaccgggagcauuauacaagccucugggaccugcgccaccuucuggucggaaagauucucaucgauguguccaacaauaugagaauuaaccaguacccugaaagcaaugccgaguaucuggccucucuguuccccgacucccucaucguuaagggcuuuaacguggucagcgcuugggcccugcaacuuggcccuaaagaugcuucucgccagguguacauuuguuccaauaacauccaggcccggcagcaagugaucgagcuggcgagacagcucaauuucauucccaucgaccuggggagccuuucuuccgcccgggaaauugagaaccugccucuccgccuguuuacccuguggagaggaccggucguuguggcuaucagccucgccacauucuuuuuccuguauuccuuugugcgggaugucauucaccccuacgcucgcaaucagcagucugacuucuauaagaucccuaucgaaauugugaacaaaacccuucccaucguugccauuacgcugcucagccugguguaccuugcgggccugcucgccgcugccuaccaacuguauuacgggaccaaguauagacgguucccucccuggcuggagacauggcuccagugccgcaaacagcugggacuucuguccuuuuucuuugcuaugguccauguggccuacagccucugucugccgaugagacggucugagagauaucuuuuccugaauauggccuaccagcaaguucacgcuaacaucgaaaacuccuggaaugaggaagagguguggcgcauugaaauguauaucagcuuuggcaucaugucucucgggcugcugagccuccuggcggucaccuccauuccuucugugagcaacgcccuuaauuggcgggaguucuccuuuauccagagcacacugggauacgucgcucuccugauuucuaccuuccaugugcugaucuacggcuggaagagagccuuugaggaagaguauuaccgcuucuauacgcccccuaacuuuguucuugcccucgugcugcccuccauugucauccugggcaagauuauccucuuccugcccugcaucagccggaaacuuaagagaauuaaaaaggggugggaaaaaucucaguuucuggaggaaggaaugggcgggacaaucccucacguguccccggagcgcguuaccgugauguga

SEQ ID NO: 3481 - RNA, 777 nt, Artificial Sequence
  EAW93749 variant
auggagagcagaaaggacaucaccaaccaggaagagauuuggaaaaugaagccccggcgcaaucuggaagauaacgacuaccuccacaaagauacaggcgagacguccaugcugaagagaccugugcuucugcaucuccaacagaccgcccacgcugacgaguucgauugcccgucugaacugcagcaugcccaggagcuuuuuccccaauggcaucugccuaucaaaauugcggcugucauggccagccucacauuccuguauacccugcuccgggaaguuauccacccccuggccacaucccaccagcaguacuuuuauaagauuccuauccuugugaucaauaaggugcugcccauggucucuauuacccuccuggcucuuguguaccugccugggguuaucgccgcuauugugcagguccacaacggaacaaaauauaagaaauucccgcauuggcucgacaaguggaugcugacccgcaaacaauuuggccugcucagccuguucuuugccgugcuucacgcgaucuacacgcuguccuaugccaugagacggucuuaccgcuacaagcuccugaauugggcuuaucagcagguucagcaaaacaaggaggaugccuggauugaacaugacguguggagaauggagaucuacgucagccuugggauugugggacuggcuauccucgcccugcuggcggugaccuccauccccagcgucucugauucccucacauggcgggaguuccacuauauucagguuaauaacaucuga

SEQ ID NO: 3482 - RNA, 1020 nt, Artificial Sequence
  AAD15620 variant
auggagagcagaaaggacaucaccaaccaggaggaacuguggaaaaugaagccccggcgcaaucucgaagaggaugacuaccugcacaaagauacaggcgaaacguccaugcuuaagagaccugugcugcuccaucugcaccaaaccgcccaugcugacgaguucgauugcccgucugagcuucagcacacacaggaacuguuuccccaguggcaucucccuauuaaaaucgccgcgauuaucgcuagccugaccuuccuguauacacuccugcgggaggucauucacccccuugccaccucccaccaacaguacuuuuauaagaucccuauccugguuauuaacaaggugcuccccauggugucuaucacacugcuugcccuggucuaccucccuggggugauugcugccaucguucagcugcauaauggaaccaaauauaagaaauucccgcacuggcuggacaaguggaugcucacgcgcaaacaguuuggccugcuuagcuucuuuuucgcugugcugcaugccauuuacucccucucuuaucccaugagacggagcuaccgcuacaagcugcuuaacugggcguaucaacagguccagcagaauaaggaagaugccuggaucgagcacgacguguggagaauggagauuuacguuucccuggggaucgugggacucgcuauccuggcccugcucgcugucaccagcauuccuucuguguccgauagccugacauggcgggaauuucacuauauccaaucuaaacuuggcauugugucccugcuccuggggaccauccaugcccuuauuuucgcguggaacaaguggaucgacaucaaacaguuugucugguacacacccccuaccuucaugauugccguuuuucugcccaucguggugcucauuuucaagagcauccuguuccugccgugucuccgcaaaaagauucugaaaaucagacacggaugggaggaugucacgaagaucaauaagacagaaauuugcucucagcuuuga

SEQ ID NO: 3483 - RNA, 498 nt, Artificial Sequence
  CCDS32752.1 variant
augggcgcccccacccugccuccggcuuggcagcccuuccucaaggaccacagaaucagcacauuuaaaaacuggccuuuccuggaggggugcgccuguacgcccgaacggauggcggaggcuggauuuauucauugcccuaccgaaaaugagcccgaucuugcccaauguuucuuuugcuucaaggaacuggagggcugggagccugacgaugacccgaucgggcccggaacaguggccuacgcuuguaacaccuccacacucggcgggcgcggaggcagaauuacccgggaagaacacaaaaagcauucuagcggcugcgccuuucuguccgucaaaaagcaguucgaggagcuuacacugggggaguuucucaagcuggaucgcgaaagagcuaaaaauaagaucgccaaagagaccaacaauaagaaaaaggaguucgaagaaacggcggagaagguucggcgcgccauugagcagcuggcugccauggacuga

SEQ ID NO: 3484 - RNA, 429 nt, Artificial Sequence
  AAC51660 variant
augggcgcccccacccugccuccggcuuggcagcccuuccucaaggaccacagaaucagcacauuuaaaaacuggccuuuccuggaggggugcgccuguacgcccgaacggauggcggaggcuggauuuauucauugcccuaccgaaaaugagcccgaucuugcccaauguuucuuuugcuucaaggaacuggagggcugggagccugacgaugacccgaucgaagaacacaaaaagcauuccucugggugugccuuucucagcgugaaaaagcaguucgaggagcugacacuuggagaguuucugaagcucgaucgcgaaagagcuaaaaacaagauugccaaagagaccaauaacaagaaaaaggaguucgaagaaacagcuaagaaaguccggcgcgccaucgagcagcuggcggccauggacuga

SEQ ID NO: 3485 - RNA, 2931 nt, Artificial Sequence
  EAW56623 variant
auggagaagcagaaacccuucgcccuguuugugccuccgagaagcuccucuagccaagucuccgcuguuaagccccagacccucggcggggacucuacauucuuuaagagcuucaacaagugcacggaagaugacuuugaguucccuuuugccaaaaccaaucuguccaagaacggagaaaauaucgauucugaccccgcgcuucagaaggugaacuuccugccugugcucgagcaggucggcaauagcgauugucacuaccaagaagggcugaaagacuccgaucuugagaacagcgagggacugucucggguguauuccaagcucuacaaagaagcugagaagauuaaaaaguggaagguuagcacagaagccgagcugcgccagaaagagucuaagcugcaggaaaauagaaaaaucauugaggcccagcggaaggcuauccaagaacuccaguuuggcaacgagaaagugucccugaaacuugaagaggggauucaggagaauaaagaccugaucaaggaaaacaaugccacccgccaucucugcaaccugcuuaaggagacaugugcuagaagcgccgaaaagaccaagaaauaugaguacgaacgggaggagacacgccaggucuauauggaucugaauaacaauaucgaaaagaugauuaccgcguucgaggaacucagagugcaagccgagaacucucggcuggaaaugcacuuuaaacugaaggaggacuacgagaagauccagcaucucgaacaggaguauaaaaaggaaauuaacgauaaagagaagcaaguuucccugcuucugauccagauuacggagaaagaaaauaagaugaaggaccucaccuuccugcuugaggaaagccgcgauaaagugaaccagcuggaggaaaagacaaaacuccaguccgagaaucugaagcaaucuaucgagaaacagcaccaucugaccaaggaacucgaggacauuaaggucagccugcagagauccgugagcacacagaaagcucuugaagaggaccugcaaaucgccaccaagacgaucugccagcucacagaagagaaagagacccagauggaagagucuaacaaggcucgggccgcgcacuccuuuguggucacagaguucgaaaccaccguuuguagccuggaggaacuucugcgcacagagcagcaaagacucgaaaagaaugaggaucagcugaagauucugacgauggaacuccagaaaaagucuagcgagcuggaggaaaugaccaaacuuacaaacaauaaagagguggaacuggaggaacucaagaaagugcugggagagaaggagacccugcuuuacgaaaacaaacaguucgagaagaucgccgaggaacucaagggcacagaacaagagcugauuggccugcuccaggcucgggagaaagaaguccacgaccuggagauccagcuuaccgccauuacgacauccgaacaauacuauucuaaggaggugaaagaucugaagaccgaacucgagaaugagaaacugaagaacaccgaacugacaagccauugcaauaaacuuucccucgagaacaaagaacugacccaggagacaagcgacaugacgcuggagcucaagaaucagcaggaagauaucaacaauaacaaaaagcaagaggaacgcaugcugaaacagaucgagaaccuucaggaaaccgagacacagcugagaaaugagcucgaauacguucgggaggaacugaagcaaaagagagacgaggugaaauguaagcuggauaaaucugaagagaacugcaauaaccuucgcaagcaggucgagaauaaaaacaaguauauugaggaacuccagcaggaaaauaaagcucugaagaagaaagggaccgccgaguccaagcaacugaacguguacgaaaucaaaguuaauaagcucgagcuggagcuugaaagcgccaaacagaaguuuggagagauuacagacaccuaucagaaggaaaucgaggauaaaaagauuucugaggaaaaccugcucgaggaaguggagaaagcuaaggucaucgcggacgaagccgugaaacugcaaaaggagaucgauaagcggugucagcacaaaauugcugagauggucgcccugauggaaaagcauaaacaccaguacgacaagaucauugaggaaagagacuccgagcuuggccucuauaaaagcaaggaacaggagcaauccucucugcgcgccagccuggagaucgaacucuccaaucugaaggcugagcuucugucugugaaaaagcagcucgaaauugagcgggaagagaaagagaagcugaaaagagaagccaaggagaacacggcgacccugaaggaaaagaaggauaaaaagacacagaccuuccuucuggagacacccgagaucuacuggaaacucgacagcaaggcuguuccuucccagaccgugagccgcaauuuuacgucugucgaucacgggauuuccaaagacaagcgggauuaccuguggacaagcgccaagaacacccucucuacaccgcugcccaaagccuauaccgugaagaccccuacaaaacccaaacuucaacagagagaaaaucugaacaucccuaucgaggaauccaaaaagaagcgcaaaauggcuuucgaguuugacauuaacagcgauucuagcgaaacgaccgaccuccuguccaugguuagcgaggaggaaacacugaagacccuuuaccggaauaacaaucccccggccucucaucugugcgugaaaacaccuaagaaagcucccuccagccucaccacgccuggauccacacugaaguucggcgccaucagaaagaugcgcgaggaucggugggcggucauugccaaaauggacagaaagaaaaagcucaaagaagcugagaagcuguuuguguga

SEQ ID NO: 3486 - RNA, 2931 nt, Artificial Sequence
  AAI44020 variant
auggagaagcagaaacccuucgcccuguuugugccuccgagaagcuccucuagccaagucuccgcuguuaagccccagacccucggcggggacucuacauucuuuaagagcuucaacaagugcacggaagaugacuuugaguucccuuuugccaaaaccaaccuguccaagaacggagaaaauaucgauucugaccccgcgcuucagaaggugaacuuccugccuguguuugagcaggucggcaauagcgauugucacuaccaagaagggcucaaagacuccgaucuggagaacagcgagggacuuucucggguguauuccaagcuguacaaagaagcugagaagauuaaaaaguggaagguuagcacagaagccgagcuccgccagaaagagucuaagcugcaggaaaauagaaaaaucauugaggcccagcggaaggcuauccaagaacugcaguucggcaacgagaaagugucccucaagcuggaagaggggauucaggagaauaaagaccuuaucaaggaaaacaaugccacccgccaucugugcaaccuccugaaggagacaugugcuagaagcgccgagaaaaccaagaaauaugaguacgaacgggaggagacacgccaggucuauauggaucuuaauucuaacaucgaaaagaugauuaccgcguuugaggaacugagagugcaagccgaaaauucccggcucgaaaugcacuucaaacugaaggaggacuacgagaagauccagcaucuggaacaggaguauaaaaaggaaauuaacgauaaagagaagcaaguuagccuccugcuuauccagauuacggagaaagaaaacaagaugaaggaccugaccuuucuccuggaggaaucccgcgauaaagugaaucagcuugaggaaaagacaaaacugcagucugagaaccucaagcaaagcaucgagaaacagcaccaucugaccaaggaacuggaggacauuaaggucucccuccagagaagcgugucuacacagaaagcucuggaagaggaccuucaaaucgccaccaagacgaucugccagcugacagaagagaaagagacccagauggaagaguccaauaaggcucgggccgcgcacagcuucguggucacagaguucgaaaccaccguuuguucucucgaggaacugcuucgcacagagcagcaaagacuggagaaaaacgaagaucagcucaagauucugacgauggaacugcagaaaaagagcuccgagcucgaggaaaugaccaagcugacaaauaacaaagagguggaacuugaggaacugaagaaagugcucggagagaaggagacccugcuguacgaaaauaaacaguuugagaagaucgccgaggaacuuaagggcacagaacaagagcucauuggccugcugcaggcucgggagaaagaaguccacgaccucgagauccagcugaccgccauuacgacaucugaacaauacuauagcaaggaggugaaagaucuuaagaccgaacuggagaacgagaaacucaagaauaccgaacugacaucccauugcaacaagcugagccuugagaauaaagaacucacccaggagacaucugacaugacgcuggagcugaagaaccagcaggaagauaucaauaacaauaaaaagcaagaggaacgcaugcucaaacagaucgagaaccugcaggaaaccgagacacagcuuagaaacgagcuggaauacguucgggaggaacucaagcaaaagagagacgaggugaaauguaagcuggauaaauccgaagagaauugcaacaaucugcgcaagcaggucgagaacaaaaauaaguauauugaggaacuucagcaggaaaacaaagcucucaagaagaaagggaccgccgagagcaagcaacugaauguguacgaaaucaaaguuaacaagcuggagcucgagcuggaaucugccaaacagaaguucggagagauuacagacaccuaucagaaggaaaucgaggauaaaaagauuuccgaggaaaaucuucuggaggaaguggagaaagcuaaggucaucgcggacgaagccgugaaacuccaaaaggagaucgauaagcggugucagcacaaaauugcugagauggucgcccugauggaaaagcauaaacaccaguacgacaagaucauugaggaaagagacagcgagcugggccuuuauaaauccaaggaacaggagcaaucuagccuccgcgccucccuggagaucgaacugucuaaccucaaggcugagcugcuuagcgugaaaaagcagcuggaaauugagcgggaagagaaagagaagcucaaaagagaagccaaggagaauacggcgacccugaaggagaaaaaggauaaaaagacacagaccuuucugcuugaaacacccgagaucuacuggaaacuggacuccaaggcuguuccuagccagaccgugucucgcaacuucacguccgucgaucacgggauuagcaaagacaagcgggauuaccucuggacaucugccaagaauacccuguccacaccgcuccccaaagccuauaccgugaagaccccuacaaaacccaagcugcaacagagagaaaaccuuaauaucccuaucgaggaaagcaaaaagaagcgcaaaauggcuuuugaguucgacauuaacucugauagcuccgaaacgaccgaccugcucagcaugguuucugaggaggaaacacugaagacccuguaccggaacaauaaucccccggccucccaucuuugcgugaaaacaccuaagaaagcucccagcucccugaccacgccuggaucuacacucaaguuuggcgccaucagaaagaugcgcgaggaucggugggcggucauugccaaaauggacagaaagaaaaagcugaaagaagcugagaaacucuucguguga

SEQ ID NO: 3487 - RNA, 2931 nt, Artificial Sequence; identical to SEQ ID NO: 3485
  AAI26267 variant

SEQ ID NO: 3488 - RNA, 330 nt, Artificial Sequence
  AAI05300 variant
auggagaagcagaaacccuucgcccuguuugugccuccgagaagcuccucuagccaagucuccgcuguuaagccccagacccucggcggggacucuacauucuuuaagagcuucaacaaaugcacggaagaugacuuugaguucccuuuugccaaaaccaaucuguccaagaacggagaaaauaucgauucugaccccgcgcuucagaacgugaauuuccugccugugcucgagcaggucggcaacagcgauugucacuaccaagaagggcugaaggacuccgaucuugagaauagcgagggacugucucggguguauuccaaacucuga

SEQ ID NO: 3489 - RNA, 1467 nt, Artificial Sequence
  BAF56181 variant
augagcguggccuucgcugcccccagacagcggggcaagggggagaucaccccugcggcuauucagaaaaugcuggacgauaacaaucaccucauccaaugcauuauggacucccagaacaagggaaaaacaucugaauguagccaguaccaacagaugcugcauacgaaucuugucuaucuggccaccaucgccgauuccaaccagaauaugcagucucuccugccggcucccccuacacaaaacaugcccaugggcccugggggaaugaaucagagcgggcccccuccgcccccucgcucccacaacaugcccucugacgggaugguuggaggcggcccucccgccccgcauaugcagaaucagaugaacgggcaaaugccuggacccaaucacaugccuaugcagggccccgggcccaaccagcuuaauaugaccaacagcuccaugaauaugccuucuagcucccauggaagcaugggcggguacaaccacucugugccguccagccaaucuaugcccgugcagaaccagaugacaaugucccagggacaaccuaugggcaauuauggccccagaccuaacaugagcaugcagcccaaucaggggccgaugaugcaccagcaaccucccucccagcaguacaacaugccucagggaggcgggcaacauuaucagggacagcagcccccuaugggcaugauggggcaagucaaucagggaaaccacaugaugggccagcggcaaauucccccguaccgcccuccccagcaggggcccccucagcaauauucuggccaggaggauuacuacggagaccaguauagccauggcgggcagggaccgcccgaaggcaugaaucaacaguacuauccugaugggcacaacgacuacggcuaucagcagcccuccuacccugagcaaggauaugauagacccuacgaagacagcucucagcacuacuaugagggcggcaauucccaguacggacaacagcaggaugcuuaucagggcccucccccgcaacagggguacccuccccagcagcaacaguauccuggacagcagggcuaccccgggcaacagcagggcuauggaccgagccagggcgggccuggaccccaauacccuaacuacccccagggccaggggcaacaguauggaggcuaccggcccacccagccugggccgccccagccuccccaacagcgcccuuauggcuacgaccagaucaugcccaagaaaccugccgaggaugaaaaugacucuaagggagugagcgaggcguccggcccgcagaacgacgggaagcaacugcaucccccuggaaaagccaauaucucugaaaagauuaacaaaagaagcggccccaagcgggggaaacacgcuuggacacaucgccucagagagcggaagcagcugguuaucuaugaggaaauuuccgauccugaggaagacgaugaguga

SEQ ID NO: 3490 - RNA, 1374 nt, Artificial Sequence
  BAF56182 variant
augagcguggccuucgcugcccccagacagcggggcaagggggagaucaccccugcggcuauucagaaaaugcuggacgauaacaaucaccucauccaaugcauuauggacucccagaacaagggaaaaacaucugaauguagccaguaccaacagaugcugcauacgaaucuugucuaucuggccaccaucgccgauuccaaccagaauaugcagucucuccugccggcucccccuacacaaaacaugcccaugggcccugggggaaugaaucagagcgggcccccuccgcccccucgcucccacaacaugcccucugacggcaugguuggaggcggcccucccgccccgcauaugcagaaucagaugaacgggcaaaugccuggacccaaucacaugccuaugcagggccccgggcccaaccagcuuaauaugaccaacagcuccaugaauaugccuucuagcucccauggaagcaugggcggguacaaccacucugugccguccagccaaucuaugcccgugcagaaccagaugacaaugucccagggacaaccuaugggcaauuauggccccagaccuaacaugagcaugcagcccaaucaggggccgaugaugcaccagcaaccucccucccagcaguacaacaugccucagggaggcgggcaacauuaucagggacagcagcccccuaugggcaugauggggcaagucaaucagggaaaccacaugaugggccagcggcaaauucccccguaccgcccuccccagcaggggcccccucagcaauauucuggccaggaggauuacuacggagaccaguauagccauggcgggcagggaccgcccgaaggcaugaaucaacaguacuauccugaugggaacucccaguacggccagcaacaggacgcuuaucagggacccccuccccaacagggcuacccuccccagcagcaacaguauccggggcagcagggauacccuggccaacagcagggguacggacccagccagggcgggccuggcccccaauauccgaauuacccucagggacagggccagcaauaugggggauacagacccacccagccuggcccuccccagcccccgcaacagcggcccuauggguacgaucagaucaugccuaagaaacccgccgaggacgaaaacgauucuaagggaguguccgaggcgagcggcccucagaaugacgggaagcaacugcaucccccuggcaaagccaacaucucugagaagauuaauaaacgcagcggaccgaagagaggcaaacacgcuuggacacaccggcuccgcgaaagaaagcagcugguuaucuaugaggaaauuuccgaucccgaggaggacgacgaauga

SEQ ID NO: 3491 - RNA, 1467 nt, Artificial Sequence
  BAF56183 variant
augagcguggccuucgcugcccccagacagcggggcaagggggagaucaccccugcggcuauucagaaaaugcuggacgauaacaaucaccucauccaaugcauuauggacucccagaacaagggaaaaacaucugaauguagccaguaccaacagaugcugcauacgaaucuugucuaucuggccaccaucgccgauuccaaccagaauaugcagucucuccugccggcucccccuacacaaaacaugcccaugggcccugggggaaugaaucagagcgggcccccuccgcccccucgcucccacaacaugcccucugacgggaugguuggaggcggcccucccgccccgcauaugcagaaucagaugaacgggcaaaugccuggacccaaucacaugccuaugcagggccccgggcccaaccagcuuaauaugaccaacagcuccaugaauaugccuucuagcucccauggaagcaugggcggguacaaccacucugugccguccagccaaucuaugcccgugcagaaccagaugacaaugucccagggacaaccuaugggcaauuauggccccagaccuaacaugagcaugcagcccaaucaggggccgaugaugcaccagcaaccucccucccagcaguacaacaugccucagggaggcgggcaacauuaucagggacagcagcccccuaugggcaugauggggcaagucaaucagggaaaccacaugaugggccagcggcaaauucccccguaccgcccuccccagcaggggcccccucagcaauauucugggcaggaggauuacuacggagaccaguauagccauggcgggcagggaccgcccgaaggcaugaaucaacaguacuauccugaugggcacaacgacuacggcuaucagcagcccuccuacccugagcaaggauaugauagacccuacgaagacagcucucagcacuacuaugagggcggcaauucccaguacggacaacagcaggaugcuuaucagggcccucccccgcaacagggguacccuccccagcagcaacaguauccuggacagcagggcuaccccgggcaacagcagggcuauggaccgagccagggcgggccuggaccccaauacccuaacuacccccagggccaggggcaacaguauggaggcuaccggcccacccagccugggccgccccagccuccccaacagcgcccuuauggcuacgaccagaucaugcccaagaaaccugccgaggaaggaaaugauucugaggaagugccggaggcgagcggcccccagaacgacgggaaggagcugugcccucccggaaagccuacaaccuccgagaaaauccaugaaagaucuggccccaagcggggcgaacacgccuggacgcaucgccucagagagcggaaacaacugguuauuuaugaagagaucagcgacccggaggaagaugacgaguga

SEQ ID NO: 3492 - RNA, 1374 nt, Artificial Sequence
  BAF56184 variant
augagcguggccuucgcugcccccagacagcggggcaagggggagaucaccccugcggcuauucagaaaaugcuggacgauaacaaucaccucauccaaugcauuauggacucccagaacaagggaaaaacaucugaauguagccaguaccaacagaugcugcauacgaaucuugucuaucuggccaccaucgccgauuccaaccagaauaugcagucucuccugccggcucccccuacacaaaacaugcccaugggcccugggggaaugaaucagagcgggcccccuccgcccccucgcucccacaacaugcccucugacggcaugguuggaggcggcccucccgccccgcauaugcagaaucagaugaacgggcaaaugccuggacccaaucacaugccuaugcagggccccgggcccaaccagcuuaauaugaccaacagcuccaugaauaugccuucuagcucccauggaagcaugggcggguacaaccacucugugccguccagccaaucuaugcccgugcagaaccagaugacaaugucccagggacaaccuaugggcaauuauggccccagaccuaacaugagcaugcagcccaaucaggggccgaugaugcaccagcaaccucccucccagcaguacaacaugccucagggaggcgggcaacauuaucagggacagcagcccccuaugggcaugauggggcaagucaaucagggaaaccacaugaugggccagcggcaaauucccccguaccgcccuccccagcaggggcccccucagcaauauucuggccaggaggauuacuacggagaccaguauagccauggcgggcagggaccgcccgaaggcaugaaucaacaguacuauccugaugggaacucccaguacggccagcaacaggacgcuuaucagggacccccuccccaacagggcuacccuccccagcagcaacaguauccggggcagcagggauacccuggccaacagcagggguacggacccagccagggcgggccuggcccccaauauccgaauuacccucagggacagggccagcaauaugggggauacagacccacccagccuggcccuccccagcccccgcaacagcggcccuauggguacgaucagaucaugccuaagaaacccgccgaggaaggaaacgacucugaggaggugccugaagcguccggcccccagaaugaugggaaggagcugugcccuccgggcaagcccacaaccagcgagaaaauccacgaacgcucuggaccuaagagaggcgagcacgccuggacgcaucggcuccgcgaaagaaaacaacugguuauuuaugaggaaaucagcgaccccgaggaagaugacgaguga

SEQ ID NO: 3493 - RNA, 336 nt, Artificial Sequence
  AAI05590 variant
augaagaccaacgacacauacaugaaauucagcuggcugacggugcccgagaagucccucgauaaagaacacagaugcaucguccggcaugagaauaacaagaauggcguugaccaggaaauuaucuuuccuccgauuaaaaccgaugugaucacaauggaccccaaggauaacuguucuaaggacgccaaugauacccugcuucugcaacucacaaacaccagcgcuuauuacauguaucugcuucugcuccugaaauccguggucuacuucgccauuaucacaugcugucugcuccgcagaaccgcguuuugcuguaauggggagaagucuuga

SEQ ID NO: 3494 - RNA, 177 nt, Artificial Sequence
  AAG29337 variant
augcagauguuucccccuagcccgcuguucuucuuucuccaacugcuuaagcaguccucuagacggcuggagcacaccuucguguuucuccgcaacuucagccugaugcuucugagauacaucggcaaaaagcggcgcgccacaagauuuugggacccccggcgcgggacgccuuga

SEQ ID NO: 3495 - RNA, 1131 nt, Artificial Sequence
  AAF26776 variant
auggccaacagcgcuaauaccaacacagugcccaagcuguacagauccgucaucgaggacguuauuaaugaugugcgggacaucuuccucgaugacggcguggaugaacagguccugauggagcuuaaaacgcugugggaaaacaagcucaugcaaucucgcgccguggacggguuucacagcgaggaacagcagcugcuucugcagguucaacagcagcaucagccucaacagcagcagcaccaucaccaucaccaccaucaacaggcgcagccgcaacagaccgugccccagcaggcucaaacacagcagguccucauuccugccucccagcaagccaccgcuccccaggugaucguuccugauucuaaacugauucagcacaugaaugccagcaacauguccgcugccgcgacagccgcuacccuggcccuccccgcuggagugacaccuguccagcaaauccugaccaauucuggccagcuucuccagguggugagagccgcgaacggggcccaguauaucuuccaaccgcagcagagcgucguucuccaacaacaggugauuccccagaugcagccuggaggcgugcaggcucccgucauccaacaggugcuggccccucuucccgggggaauuuccccgcagacgggcguuaucauucagccucagcagauccuguuuaccggcaauaagacacaagugauucccaccacagucgcugccccuacccccgcccaggcucagaucacggcgacagggcaacagcagccccaggcccaaccugcucagacccaggccccgcucgugcugcagguugacggaacaggcgauaccagcucugaggaggacgaagaugaggaagaggacuacgaugacgacgaggaagaggauaaagaaaaggacggggccgaggauggacaaguggaagaggagccccugaacuccgaagacgaugucagcgacgaggaaggccaggagcuguucgauaccgaaaauguggucgugugccaguaugacaagauccaucggucuaaaaacaaguggaaauuucaccugaaggaugggauuaugaaucuuaacggacgcgacuacaucuucuccaaagcuauuggcgaugccgagugguga

SEQ ID NO: 3496 - RNA, 1173 nt, Artificial Sequence
  AAH00125 variant
augcccccuagcggccugagacuccugcuucugcuccugccgcuucuguggcuccuggugcugacccccgggcggccugccgcuggacucuccacaugcaagacgaucgacauggagcuggucaaacgcaagagaauugaagccauccggggccagauucuuucuaaacugcgccucgcgagcccucccucccaaggggagguucccccuggaccgcugcccgaagcugugcuugcccuguacaacucuaccagagaucggguggccggcgagagcgcugaaccugagcccgagccugaagccgacuauuacgcuaaggaggucacacgcgugcucaugguugaaacccacaaugagaucuaugauaaauucaagcaguccacacauucuauuuacauguuuuucaacaccagcgagcugagagaagccgugcccgagccgguccugcucucccgggcggaacugcgccuucugagacucaagcugaaaguggagcagcacguugaacuuuaucagaaguacagcaauaacucuuggcgguaucuguccaaucgccuccuggccccuagcgacucucccgaguggcuguccuuugaugugacaggggucgugagacaauggcucagccggggaggcgagaucgaaggcuuccgccugucugcucauuguuccugcgacagcagagauaacacccuucagguggacaucaauggguuuacgaccggacggagaggcgaucuggccacaauucacgggaugaaccgcccuuuccuccugcuuauggcuacaccccuggagcgggcccagcaucuccaguccucuagacaccgccgggcgcuggacaccaauuacuguuuuagcuccaccgagaaaaacugcugugucagacaacuguacaucgauuuccgcaaggaccucggauggaaauggauucacgaacccaagggcuaucaugccaauuuuugccuggggccuuguccguacaucuggagccuugauacgcaguauucuaagguucuggcucucuacaaccagcacaaucccggagccuccgcugccccuugcugugugccccaggcccuggaaccucugcccauuguguauuacgucggccggaaaccgaagguggagcaacuuagcaacaugaucguuagaucuugcaaauguagcuga

SEQ ID NO: 3497 - RNA, 1704 nt, Artificial Sequence
  AAT70724 variant
augggcagagggcugcuccggggacuguggccccuucacaucgugcuguggacccgcauugccagcacaaucccuccgcauguccagaaguccguuaacaaugacaugauugugacggauaacaauggcgcugugaaauucccccaacucugcaaguuuugugacgucagauucucuaccugcgauaaccagaaaagcuguauguccaauugcucuaucacaagcauuugugagaagccucaggaagugugcguugccguguggcggaaaaacgacgagaauaucacccuggaaacagucugucacgaucccaagcugccuuaccaugacuuuauccuggaggaugcggcuucccccaagugcauuaugaaagaaaagaaaaagccuggggagaccuucuuuauguguucuugcagcuccgacgaguguaacgauaauaucauuuucagcgaagaguauaacacaucuaauccggaccuccugcuggugaucuuucagguuaccggaauuucccuccugcccccucuuggcguggccaucagcgucauuaucaucuucuacugcuaucgcgugaacagacaacagaaacugucuuccacgugggaaaccgggaagacacggaagcucauggaguuuagcgagcacugcgccauuauccuggaagaugaccgcucugauauuuccagcaccugugcuaauaacaucaaucauaacacagagcuucugcccauugaacucgacacccuggugggaaaaggcagauucgccgaggucuacaaggcuaaacugaagcagaacacguccgaacaguuugagacaguugccgugaaaaucuucccuuaugaggaauacgcgucuuggaagaccgagaaagacaucuuuagcgauauuaaucucaagcacgaaaacauccugcaauuccuuacagccgaggaacggaagaccgagcugggcaaacaguauuggcucauuaccgcuuuccacgccaaggggaaucugcaggaguaccuuacacgccaugugaucuccugggaagaccugagaaaacucggaagcucucuggcucggggcauugcccaccuucauuccgaucacacgcccugcgggcgcccgaagaugccuaucguccacagagaccucaaaagcucuaacauccuggugaagaaugaucuuaccuguugccugugugacuuuggacucagccugcggcuugaucccacacuguccguugacgaucucgcgaacucuggccagguggggaccgcccgcuacauggcuccugagguccuggaaagcagaaugaaucuggagaacguggaauccuucaagcaaacagacguuuauagcauggcccucgugcugugggagaugaccucucggugcaaugcugucggagaggugaaagauuacgaaccucccuuuggcuccaaggucagagagcaucccuguguggaaagcaugaaagacaacguucuucgcgaccggggcagaccggagauucccucuuucuggcugaaucaccaggggauccagauggugugcgagacgcucacagaauguugggaucaugacccugaggcccgccugaccgcccaaugcgucgcugaacgguuuuccgagcuggaacaccuugauagacucagcggacgcuccuguucugaggagaagauucccgaagacggcagccugaacaccacaaaauga

SEQ ID NO: 3498 - RNA, 2055 nt, Artificial Sequence
  BAG35778 variant
augauggacgccagcaaggagcuccaggugcugcacaucgauuuccugaaccaagacaaugcugucucccaucacaccugggaauuucagacaucuagccccguuuucagacggggccagguguuucaucuucgccuggugcucaaccagccuccgcaauccuaccaccagcugaaacuugaguucucuacggggcccaauccuagcauugccaagcauacccuggucgugcucgaucccagaacaccuuccgaccacuauaacuggcaggcgacccugcagaaugaaucuggaaaagagguuacaguggcugucaccagcucccccaacgccauccugggcaaguaccaacucaaugugaaaacagggaaccacauucugaaaagcgaagagaauauccuuuaucugcucuuuaacccuuggugcaaggaggauaugguuuucaugccggacgaagaugagcggaaagaauacauucugaaugacaccggaugucauuaugugggcgccgcucgcucuaucaagugcaaacccuggaacuuugggcaguucgagaagaauguccuugauuguugcaucucccugcucacggagagcucucugaaaccuaccgacagacgggaucccgugcuggugugucgcgccaugugcgcuaugauguccuuugaaaagggacagggcguccucauuggcaacuggacaggggacuacgagggaggcaccgccccuuauaaguggacagggagcgcgcccauccugcagcaauacuacaauaccaaacaggccguuuguuucggacagugcuggguguuugcuggcauucuuacgacagugcugagagcccucgggaucccggcucggucugucaccggauucgauuccgcccacgacacagaacgcaaccugaccguggacaccuauguuaacgagaauggcgaaaagauuacaagcaugacgcaugauuccguguggaacuuucacgucuggaccgacgcguggaugaaaagaccugaucuucccaagggcuacgacggguggcaagccguggaugcuacaccucaggagcggucucagggaguuuucuguugcggccccagcccccugaccgccauccgcaaaggggacauuuucaucguguaugauacaagauuugucuucuccgaggugaauggagaccggcucaucuggcuggucaagauggugaacggccaggaggaacugcacguuauuagcauggaaaccacgucuaucgggaaaaauauuuccacaaaggcugugggacaagaucgcagacgggacaucaccuacgaguauaaguacccugaaggcagcucugaggagagacaggucauggaucaugccuuucuccugcuuagcuccgaacgcgagcaccggagaccggugaaagaaaacuuccugcauaugucuguucagagcgacgacgugcuccugggcaauuccgucaacuuuaccgugauucuuaagcgcaaaacagccgcucugcagaaugugaacauccucgggagcuucgagcugcaacuguauaccggaaagaaaauggcgaagcucugugaucugaauaagacaucucagauccagggccagguuuccgaagucacgcuuacccuggacagcaaaacauacauuaacucucucgccauccuggaugacgagcccgugauucggggguuuaucauugcugagaucguggaauccaaggagaucauggccagcgaagucuucaccuccuuucaauacccugaguucucuauugagcugcccaauacaggaagaaucggccagcuucucgugugcaacugcauuuuuaaaaauacccuggccaucccucugacggauguuaaguucagccucgaaucccuggggauuucuagccuucagaccuccgaccacggcacagugcagcccggagagaccauccaaagccagauuaaauguacaccgaucaagaccggcccuaagaaauuuaucgucaagcugucuuccaaacaggugaaggaaauuaacgcucaaaagaucguucucauuacgaaguga

SEQ ID NO: 3499 - RNA, 3375 nt, Artificial Sequence
  CCDS6519.1 variant
auggacagccuggccucccucgugcugugcggcgucucucuucugcucagcgggaccguugagggagcuauggaucugauccuuauuaacucccugccccucgugucugacgccgaaacaagccugacguguaucgcguccggcuggagaccucacgagccgauuaccaucgggcgggauuucgaagcucugaugaaucagcaucaagacccccucgaggugacacaggaugucacccgcgaaugggccaagaaagugguuuggaagagagagaaagccucuaagauuaacggagcuuacuuuugcgagggccgggugcgcggggaagccaucagaauccggacaaugaaaaugcgccagcaggcuagcuuccugccugccacccuuacaaugaccgucgacaagggagauaaugugaacauuuccuuuaagaaaguucugaucaaggaggaagacgcggugauuuauaaaaauggcagcuucauccacucuguccccagacaugaggugccugauauucucgaggugcaucugccccacgcccaaccucaggacgcuggcgucuacuccgcccgguauaucgggggaaaccuuuuuacgagcgcuuucacccgccugauuguuagacggugugaagcccagaaguggggcccggagugcaaucaccucuguacagcgugcaugaacaauggggugugucacgaagauaccggagagugcaucugucccccuggcuuuauggggcgcacaugcgaaaaagccugugagcugcauaccuucggaagaacgugcaaggagcggugcucuggccaggaaggcuguaaguccuacguguuuugccugcccgacccuuauggguguagcugcgcuacaggauggaaaggccuccaauguaacgaggccugccaccccggguucuacggaccggauuguaagcugcgcugcucuuguaauaacggcgaaaugugcgacagauuucaggggugucuuugcuccccuggauggcagggccugcagugcgagcgggaaggcauccaaagaaugacccccaaaauugucgaccucccugaucauaucgaggugaauagcgggaaguucaaccccauuuguaaggcuuccggauggccccugccuacaaaugaggaaaugacccuuguuaaaccggacggcaccgugcugcaccccaaagauuuuaaccacacagaccauuucucugucgccaucuucacgauucaccgcauccucccucccgauagcgggguguggguuugcuccgugaacaccgucgccggaaugguggagaagccuuuuaauaucagcgucaaggugcugcccaaaccgcugaacgcuccuaauguuauugacacaggccauaacuucgcggugaucaauauuucuuccgaacccuauuuuggggauggcccuaucaagagcaaaaagcuccuguacaaacccgucaaccacuacgaggccuggcagcauauucaggugaccaaugaaaucguuacacuuaacuaucuggagccucggaccgaguacgaacucugugugcaacuggucagacgcggagagggcggggaaggacaccccggcccggugcggagauucacgacagcuucuaucgggcuuccuccuccccgcggacugaaucuccugcccaagagccagaccacccugaaccucacauggcagccgauuuuucccuccucugaggacgauuucuauguggagguugaacggagaagcguccagaaguccgaccaacagaauaucaaagugccuggcaaccugaccagcgugcuucugaauaaccuccacccccgcgagcaguacgucgugcgggccagaguuaauacaaaggcccagggggaauggucugaggaucugacggcuuggacccuguccgacauucuuccuccccaaccugaaaacaucaaaauuagcaacaucacacauucuuccgccgugauuagcuggaccauccucgacggcuauuccaucucuagcauuacaauccgcuacaagguccagggcaaaaaugaggaucagcacguggacguuaagauuaagaacgcgaccaucacgcaguaucaacugaaaggacuggagcccgaaaccgcuuaccagguggauauuuuugccgagaauaacaucggguccucuaauccggccuucagccaugaacucgucacacugccugagucccaggcucccgccgaccuuggaggcgggaagaugcugcucaucgcuauucugggaagcgccggcaugaccugccugacagugcuucucgcguuucugaucauucugcagcucaaacgggccaacguucaaagacggauggcucaggccuuccagaaugugcgcgaggaaccugcuguccaauuuaacucugggacccuggcccuuaauagaaaggugaaaaacaaucccgauccgacgaucuacccugugcuggacuggaacgauauuaaguuccaggacgucaucggcgagggaaauuuuggccagguucucaaggcgcggaucaaaaaggaugggcugagaauggacgccgcuauuaaacgcaugaaggaauaugccuccaaagaugaccaccgggauuucgcuggagagcuggaagugcuuuguaagcucggccaccaucccaacaucauuaaucugcugggggccugcgagcacagaggauaccucuaucuggccaucgaauacgcuccucauggcaaccuucuggacuuccuccgcaaaagcagagugcuggagacagaccccgcguuugccauugcuaacucuaccgccuccacacugagcucucagcaacuucuccacuucgccgcugaugucgcccgggggauggacuaucugagccagaagcaguuuauccaucgcgaucuggcggcuagaaauauccucgugggcgagaacuacguugccaagauugccgacuucggacugucccggggccaggaaguguaugucaaaaagaccauggggcgccuucccgugagauggauggcuaucgagagccugaauuacucuguuuacaccacaaacuccgauguguggagcuauggaguccuccugugggaaauugugucccugggcgggacgccuuacuguggaaugaccugcgccgagcuuuaugagaaacugccgcaaggcuaccggcucgaaaagccccugaauugugacgaugagguuuaugaccucaugcgccagugcuggagagaaaaaccuuacgagcggcccucuuuugcgcagauccuggugagccuuaaccgcaugcuggaagagagaaagacauaugucaauaccacacucuacgagaaguucaccuacgcuggcauugauuguuccgccgaagaggccgcuuga

SEQ ID NO: 3500 - RNA, 1791 nt, Artificial Sequence
  BAF84950 variant
auggccgacgcugaggccagagcggaauuucccgaggaagcucggccugaucgcggcacccuucaggugcuccaagacauggccagcagacugcggauccacuccauucgcgccacaugcucuacgagcuccgggcauccgaccucuuguagcuccucuagcgagaucauguccguccuuuucuucuacauuaugagauauaagcagagcgaucccgaaaacccugacaaugaucgguuuguucuggcuaaacgccucucuuucguggacguggccacaggauggcugggccaggggcuuggagucgcuugcggcauggccuacaccgggaaguauuuugauagagcguccuaccggguguucugucugaugagcgacggagagucuuccgagggcagcguuugggaagccauggcuuuugccucuuauuacucccucgauaaccugguggcuaucuucgacgucaaucgccugggccacagcggggcccuccccgcggagcauugcauuaacaucuaucagagacggugugaagccuuuggauggaauacauacgugguugauggccgcgacguggaggcucugugccaagucuucuggcaggccucccaggugaaacacaagccuaccgcuguggucgccaaaacauuuaaggggagaggaacccccucuaucgaggaugccgaaagcuggcaugcuaagccuaugccgcgggagcgcgcggacgccauuaucaaacuuauugaaucccagauccaaacgagcagaaaccuggacccccagccucccauugaggauucuccugaaguuaauaucaccgacgugcggaugacauccccgcccgauuacagagugggcgacaagauugcuacccgcaaagccugugggcucgcccuggcuaagcugggauaugccaacaaucgggucgugguucuggauggcgacacaagauacagcaccuucucugagaucuuuaacaaagaguauccugaacgcuucaucgagugcuucauggcggaacagaauauggugagcgucgcucucggcugugccucccgggggagaacgauugccuuugcuucuacauucgccgcuuuucugacccgcgccuucgaucacauccggauuggaggccuggcggagagcaacaucaauauuaucgggucccacugcggagugagcguuggcgacgauggggccucucagauggcucucgaagacaucgccauguuuagaacaauucccaaguguaccaucuucuacccuaccgaugcuguguccacagagcaugccgucgcgcuggccgcuaacgccaagggaaugugcuuuauucgcacgacccggcccgagacaauggugaucuauacaccccaagaaagauucgagauuggccaggcuaaaguccuucgccacugcgugagcgacaagguuaccgugaucggcgccgggaucaccgucuacgaagcccuggcugcggccgacgagcucucuaaacaggauauuuuuauccgggugauugaccuguucacgaucaagccucuugauguugcuacaauuguguccagcgccaaagccaccgaaggaagaaucauuaccgucgaggaccauuauccgcaaggcgggaucggagaggcugugugugccgcgguguccauggaucccgacauccagguucacucucuggcugucagcggcgugccucaguccgggaagucugaggaacuccuggauauguacggcauuagcgcccggcacaucauuguggccgucaaaugcaugcugcucaauuga

SEQ ID NO: 3501 - RNA, 861 nt, Artificial Sequence
  EAW88722 variant
auggccgaggacggcgaagaggcugaguuccacuuugccgcgcuguacaucagcgggcaguggcccagacuccgggcugauaccgaccugcaacgccuuggauccucugccauggccccuagcagaaaguucuuugugggcgggaacuggaaaaugaauggacggaagcagucccugggcgaacucauugggacacugaacgcugccaaagucccggcugauacggaaguugugugcgcgcccccuaccgccuauaucgacuucgcccgccagaagcuggaucccaaaauugcuguggccgcucagaauuguuacaaggucacaaacggagccuuuaccggcgagaucucuccuggcaugauuaaggacugcggggcgacaugggugguucugggacauagcgagagacggcacguguucggcgaauccgaugagcucaucgggcaaaaagucgcccaugcucuggccgaaggacugggcgugaucgcuuguauuggggagaagcucgacgagcgcgaagccggaaucaccgagaaaguuguguuugaacagacaaaggucauugccgauaaugugaaagacuggucuaaggugguccuggcuuaugagcccguuugggcgaucggcaccggcaagacggccaccccucagcaggcucaagaagugcacgagaaacuuagaggguggcuuaagagcaacguguccgaugccgucgcccagagcacacggauuaucuacggaggcucugugaccggggcuacaugcaaagagcucgccucccagccggacguugauggauuccuggugggcggggcgagccuuaagcccgaauuugucgacauuaucaaugcuaaacaguga

SEQ ID NO: 3502 - RNA, 357 nt, Artificial Sequence
  CAA72108 variant
augccccugguggucgccguuaucuucuuuagccucuggguguucgcucugggccagcuugagcaaccugaaauuuccaucucuagaccggccaacaagagcgcgcacauuuccuggaaggcuucuauccagggguuuagcuccaaaauuauccauugguacuggcagaaacccaauaagggacuggaguaucuccugcacguguuccuuaccaucucugcccaggacugcagcggcgggaaaacaaagaagcuggaagucuccaaaaacgcccauacgagcaccucuacacucaagauuaaauuucuggagaaggaagaugaggugguuuaccacugugcuugcuggauccggcau

SEQ ID NO: 3503 - RNA, 414 nt, Artificial Sequence
  EAL23985 variant
augcugagccuccugcacaccuccacacuugccgugcugggcgcucucugcgucuacggggccggacaucuggagcagccccaaaucucuagcacgaagacccuuuccaaaacagcgagacuggaauguguugugucuggcauuaccaucagcgcuacauccguguauugguaccgggagcgcccuggggaagucauucaguuccucgugucuaucagcuaugacggaaccguuagaaaggaguccggcauuccgagcgggaaauuugaaguggaucggauccccgagacaucuaccuccacgcugaccauccacaacgucgagaagcaggacauugccacauacuauugcgcccugugggaagugcauagcucucgccaguucgagccuucccacagcaucaauguuuacuga

SEQ ID NO: 3504 - RNA, 366 nt, Artificial Sequence
  CAA30181 variant
augcugagccuccugcacaccuccacacuugccgugcugggcgcucucugcgucuacggggccggacaucuggagcagccccaaaucucuagcacgaagacccuuuccaaaacagcgagacuggaauguguugugucuggcauuaccaucagcgcuacauccguguauugguaccgggagcgcccuggggaagucauucaguuccucgugucuaucagcuaugacggaaccguuagaaaggaguccggcauuccgagcgggaaauuugaaguggaucggauccccgagacaucuaccuccacgcugaccauccacaacgucgagaagcaggacauugccacauacuauugcgcccugugggaagug

SEQ ID NO: 3505 - RNA, 366 nt, Artificial Sequence
  CAA33345 variant
augcugagccuccugcacaccuccacacuugccgugcugggcgcucucugcgucuacggggccggacaucuggagcagccccaaaucucuagcacgaagacccuuuccaaaacagcgagacuggaauguguugugucuggcauuaagaucagcgcuaccuccguguauugguaccgggagcgcccuggggaagucauucaguuccucgugucuaucagcuaugacggaacaguuagaaaagaguccggcauuccgagcgggaaguuugaaguggaucggauccccgagaccucuacauccacccugacgauccacaacgucgagaaacaggacauugccaccuacuauugcgcccugugggaagug

SEQ ID NO: 3506 - RNA, 2382 nt, Artificial Sequence
  AAA93251 variant
augauggccgcucuguaccccagcaccgaccucuccggcgccucuagcuccucucugccuagcuccccgucuagcuccagccccaacgaggugauggcgcuuaaggaugucagagaaguuaaagaggaaaauacacugaacgagaagcucuuucugcuugcuugcgacaaaggggauuauuacauggugaagaaaauccuggaagaaaauucuuccggagaccucaacauuaauuguguggauguccugggccggaacgccgugacgaucaccauugagaaugaaaaccuggacauccuccagcugcuucuggauuaugggugccaaagcgccgacgcucuccugguugccauugauucugagguggucggagcuguggacauccuucugaaucaccgcccuaagagauccagccggcccacaaucguuaagcucauggaacgcauucagaacccugaguacucuaccacaauggauguggcccccgucauccuggcggcccauagaaauaacuaugagauucugaccaugcuccugaaacaggacgugucccuuccuaagccgcacgcugugggcugugaaugcacacuguguagcgccaaaaauaagaaagauucccuccggcauucucgcuuuagacuggacaucuaccggugccuugcuagccccgcccugauuaugcucaccgaggaagacccuauccugcgcgcguucgagcuguccgccgaucucaaggaacugagccuugucgagguugaguuuagaaacgacuaugaggagcuggcucggcaguguaagauguucgccaaagaucuccuggcucaagcccgcaauucuagagaacuugaggugauucugaaccacacguccagcgacgaaccccucgauaagcgggggcugcuggaggagcgcaugaaccucucuagacugaaacuugccaucaaguacaaucagaaagaauuugugagccaguccaacugccagcaauuccugaauaccgucugguuuggacagaugucuggcuaccggagaaagccuacauguaaaaagaucaugaccgugcucacaguuggcauuuucuggcccgugcugagccugugcuaucuuaucgcuccgaagucccaguuugggcgcauuauccauaccccuuucaugaaauuuauuauccacggagcgagcuacuucacguuucuccugcugcucaaccuguauucucuugucuacaaugaggacaagaaaaacacaaugggccccgcccuggaacggaucgauuaucuccugauucuguggaucauugggaugaucugguccgacauuaagagacuuugguacgagggacucgaagauuuccuggaggagagccgcaaucagcugucuuucgugaugaacucccucuaucuggcuaccuuugcccuuaaaguuguggcccacaauaaguuccaugacuuugcugaucggaaggacugggacgccuuccacccuacacuggucgcggaaggccucuuugcuuucgccaacgugcugagcuaccugagacuuuucuucauguacaccaccuccucuauccucgggccccugcaaaucagcaugggacagaugcugcaggauuuuggcaaauuccucggcauguuucugcuuguccuguucuccuuuacaauugggcucacgcaacuguaugacaagggauacaccucuaaagagcagaaggauugugugggcaucuucugcgaacagcagagcaaugacacauuccauuccuuuauugggaccugcuucgcccuguuuugguauaucuucagccuugcucacguugccauuuuugugacacgcuucucuuacggagaggagcuccaauccuuugucggcgcugugaucguugggaccuauaacguggucguggugauuguucugacgaaacugcucgucgccaugcugcacaagagcuuccagcuuaucgcgaaucaugaagauaaggaguggaaauuugcccgggcuaagcuguggcucucuuacuucgacgauaaauguacacugcccccuccguuuaacaucauucccuccccuaagaccaucugcuauaugauuagcucucugagcaaauggaucuguucccacaccagcaagggaaaggugaaaagacaaaauucucuuaaggaauggcgcaaccugaaacagaagcgggacgagaacuaccagaaagugaugugcugucucguccauagauaccugacauccaugcgccagaagaugcagagcaccgaucaggccacaguggaaaaucucaacgagcugcggcaagaccuuuccaaauucagaaaugagauucgggaucugcucggcuuucgcacgucuaaguaugcuauguucuaccccagaaacuga

SEQ ID NO: 3507 - RNA, 3315 nt, Artificial Sequence
  AAZ73614 variant
augagcuucagagccgcucggcuguccaugcgcaacagacggaaugacacccucgauucuacacgcacgcuguacagcuccgccucuagaagcaccgaccuuuccuauucugagagcgaucuggugaacuuuauccaggcgaauuucaagaaacgggaaugcgucuuuuucacaaaggacuccaaagcuaccgagaacguuuguaagugcggcuacgcccaaagccagcacauggaagggacacagauuaaucagucugagaaauggaacuauaagaagcauaccaaagaauuucccacagaugccuucggagacauccaauuugagacccucggcaagaaagggaaguacauucgccuguccugugauacggacgcugagauccuuuaugaacugcucacccagcacuggcaucugaaaacaccuaaucuggugauuagcgugaccggaggcgccaagaacuucgcucucaagccgagaaugcggaaaaucuuuucucgccugaucuacauugcccaguccaagggggcguggauccuuacaggaggcacccacuauggccugaugaaauacauuggggaggucgugagagauaauacgaucagccggucuuccgaagagaacauuguugccaucggaauugcugccuggggcauggugagcaaucgcgacacacucaucagaaacugcgaugcugagggguacuuccuggcccaguaucuuauggacgauuuuacccgggacccccuguacauccucgacaauaaccauacacaccuucugcucgucgauaauggaugucacggccauccuaccguggaagcgaagcugcgcaaccaacuugagaaauauauuuccgaaagaaccauccaggacucuaacuacgggggaaagauucccaucguuugcuucgcccagggcggcgggaaagagacacugaaggcuauuaauacgagcaucaagaacaaaaucccuuguguggucguggaaggauccggccagauugccgaugugaucgcuagccucgucgagguugaggacgcccugaccucuuccgccgugaaggaaaaacuugugcgguuucugcccagaacagucagccgccucccugaggaagagaccgaaucuuggauuaaguggcugaaagagauccuggagugcagccaccuccugacagugauuaagauggaagaggcuggggaugaaaucguuuccaaugcgaucucuuaugcccuuuacaaggcuuucagcaccuccgagcaagacaaagauaacuggaauggacagcugaagcuccugcuugaauggaaccagcuggaccucgccaaugaugagauuuucacgaacgaccggagaugggagagcgccgaucugcaagaagugauguuuacagcucugaucaaagaccgcccgaaguucguccggcucuuucuggagaauggccuuaaccugagaaaauuccucacccaugacgugcugaccgaacuguuuucuaaucacuucuccacacuuguuuaucgcaaccuccagauugccaagaauagcuacaacgaugcgcugcugaccuuuguguggaagcucgucgcuaauuuccggagaggguuucgcaaagaggaccggaacggaagagaugagauggacaucgaacugcacgaugugucucccauuacacgccauccucuucaggcccuguucaucugggccauucuccagaacaagaaagagcuguccaaggucaucugggaacaaacgcggggcuguacccuggcugcccuuggcgcuagcaaacuccugaagacacuggccaaggugaaaaaugacaucaacgcggccggggaguccgaggaacucgcuaaugaguacgaaaccagagccguugagcuguuuacagaaugcuauucuagcgaugaggaccuugcugaacagcugcucguguacuccugugaggccuggggaggcucuaacugccuggagcuggcggucgaagccaccgaucagcacuucauugcucagcccggggugcaaaauuuucuuagcaagcagugguauggagagaucucccgggacacgaaaaacuggaagauuauccucugccuguucauuaucccucugguuggcuguggguucgugagcuuucgcaaaaagcccgucgauaaacauaagaagcuccugugguacuauguggccuucuuuaccucuccguucguggucuuuuccuggaauguuguguucuacaucgcuuuucuucuucucuucgccuaugugcugcugauggacuuucacagcgucccucaucccccugaacuugugcucuacucucugguuuucgugcuguuuugcgaugaggucagacagugguacgugaacggcguuaauuauuucacagaccucuggaacgugauggacacccugggacuguuuuacuucauugccggcaucgucuuccggcugcacuccagcaauaaaucuagccucuauuccgggagagugaucuuuugucuggauuacauuauuuucacacugcgccuuauccacaucuuuaccguuagccggaaccugggacccaagauuaucaugcuccagagaaugcugauugacguguucuuuuuccucuuucuguucgcugucuggaugguggcguuuggcguggcccgccaagggauccuuagacagaaugaacagcgguggcgcuggauuuucagaucugucaucuaugagcccuaccuggcuauguuuggacagguuccuuccgauguggacggcacgacauaugauuucgcccauugcaccuucacagggaacgagagcaaaccgcucuguguggaacuggacgagcacaaucugccccgguuuccugaauggaucaccauuccccuugucugcaucuacaugcuguccaccaacauucuccuggugaaccuccugguugccauguucggcuacacagugggaacgguccaagagaauaacgaucagguguggaaguuucagcgcuauuuccuuguucaagaguacuguucuagacugaauaucccuuuucccuucauuguguuugcuuauuucuacauggucgugaaaaagugcuuuaaguguugcuguaaagaaaagaacauggagagcuccguuugcugcuucaaaaaugaagacaacgagacccucgccugggaaggcgugaugaaggagaauuaucuggucaaaaucaacacaaaggcgaaugauaccucugaggaaaugcggcaucgcuuuagacagcuggacacaaagcugaacgaucugaaagggcuccugaaggagauugcuaauaaaaucaaguga

SEQ ID NO: 3508 - RNA, 2097 nt, Artificial Sequence
  AAK13079 variant
augaugagaagccgguccaagucuccccgcagaccuagcccgaccgcccggggcgcuaacugcgacguggagcugcucaaaacaacgacccgcgauagagaggaacugaaguguaugcuugaaaaauacgagcggcaccuggccgaaauccaggggaaugucaagguucucaaauccgagcgcgacaagauuuuccugcuuuaugagcaagcgcaggaagagaucacaagacugcggcgcgaaaugaugaagucuugcaaaagccccaaguccaccacagcucaugccauucucagacggguggagaccgagcgcgauguggccuuuacagaccugagacggaugaccacggaacgcgauucucugagagagcggcucaaaaucgcucaggaaaccgccuucaacgagaaggcucaccuggaacagagaauugaggagcuugaauguacaguccauaaucuggacgaugagcgcauggaacaaaugagcaacaugacccucaugaaagagacaaucuccaccguggaaaaggagaugaaaagccuggcccggaaggcgauggacacggagucugaacuuggaagacagaaggccgagaauaacucccugcgccuccuguacgaaaauacagagaaagaucugagcgacacccagcggcaccucgcuaagaaaaaguaugaacugcagcuuacacaagagaaaaucaugugccuggaugagaagauugacaacuuuaccagacagaauaucgcccagcgcgaagagauuucuauccucggcgggacccugaacgaucuugcuaaggaaaaagagugucugcaggccugccucgacaagaaauccgagaauauugcgagccugggagaaucucuggccaugaaggagaaaacaaucuccggcaugaagaacauuaucgcugaaauggagcaagccagccggcaguguacggaagcucucaucguuugcgagcaggacguguccagaaugcgccggcaacuggaugagaccaaugacgaacuugcccagauugccagagagcgcgauauccuggcucaugacaacgauaaucuccaggaacaguucgcgaaggccaaacaagagaaccaggcucugucuaagaaacuuaacgacacacacaaugaacugaacgauauuaagcagaaaguccaggacaccaaucucgaggugaacaagcugaagaauauccugaaaagcgaggaauccgagaaccggcaaaugauggaacagcucagaaaggccaaugaggaugccgaaaacugggagaauaaagcucggcagagcgaggccgacaacaauacacugaaacuugaacugauuaccgcggaggcugaagggaaccgccucaaggagaagguugauucucugaauagagagguggaacagcaccugaacgccgagcgguccuacaagagccaaaucucuacgcuucauaaaagcgucgugaagauggaagaggaacuccagaaagugcaguuugagaaggucuccgcccuggcugaccugucuagcacaagagagcucuguaucaaacuggacuccagcaaggaacuucugaaucgccagcucguugccaaagaucaagagauugaaaugcgggagaacgaacuggacucugcucacuccgagaucgagcugcuuagaagccagauggccaacgaacgcauuucuaugcagaaucucgaggcgcugcugguggccaacagagauaaggaauaucaaucccagaucgcucuccaggagaaggaaagcgagauucagcugcuuaaagagcaucugugccucgccgaaaauaagauggcuauccaaucccgggacguggcccaguuccgcaacgucgugacccagcuggaggcggaucuggacaucaccaaaagacagcuuggaacagaacgguuugagcgcgagagagccguucaagaacuccggcgccagaauuacucuagcaacgcuuaucacauguccucuaccaugaagccuaauacaaaaugucacagccccgagagagcccaucaccgguccccugaucgcggccuggacagaagccuggaagagaaccucugcuaccgggauuucuga

SEQ ID NO: 3509 - RNA, 927 nt, Artificial Sequence
  CCDS48205.1 variant
augagacccgagggcagccugaccuaccgggugccugaacgccucagacagggguucugcggagucggccgggccgcucaagcccugguuugugcguccgcuaaggaggggacagccuuucgcauggaagccgugcaggagggagcugccggcguggaaucugagcaggcugcccuuggggaggaagcgguccugcuccuggacgauaucauggccgagguggaaguuguggcugaggaggaaggacuugucgagagacgggaagaggcccagcgcgcucaacaggccgugccgggccccggcccuaugacgcccgaaagcgcgccugaggagcugcucgccguucagguggaacuggagcccgucaacgcucaggccagaaaagccuucucccggcaacgcgaaaagauggagagacggcgcaaaccucaccuggacagacgcggggcugugauucagucugugccgggauuuugggccaaugucaucgcuaaccauccccagaugagcgcgcucauuaccgaugaagacgaggauaugcuguccuauaugguuucucuugaggugggcgaagagaagcacccugugcaucugugcaaaaucaugcuguucuuucggagcaaucccuacuuccagaacaaggucauuacaaaggaauaucucgugaauaucaccgaguacagagccucccacagcacaccuaucgaaugguaucccgacuacgagguugaggcuuaucggagacgccaucacaacucuucccuuaacuuuuucaauugguuuagcgaucacaauuucgccgggucuaacaaaauugccgaaauccuguguaaggaccucuggcggaauccgcugcaauacuacaaaagaaugaagccucccgaggaaggaaccgagacauccggcgauagccagcugcucucuuga

SEQ ID NO: 3510 - RNA, 369 nt, Artificial Sequence
  M13231.1 variant
augagaugggcccugcucgugcugcuugcuuuccugagccccgccucccagaagucuagcaaccucgagggccggaccaaauccgucacacgccaaacggggucuagcgcggaaauuaccugcgaccugacaguuaccaauacauuuuacauccacugguaucuucaucaggagggaaaggcuccucagagacugcucuacuaugauguguccaccgcccgggacgugcuggaaucuggccugagcccggggaaauacuauacacacacgccccgcagaugguccuggauccuccggcugcagaaccuuauugagaaugauagcggagucuacuauugugccaccugggaccgccaaaagcugcucuga

SEQ ID NO: 3511 - RNA, 804 nt, Artificial Sequence
  CCDS12619.1 variant
augggcgccagacagauccaaaccagcuccucucagacaagccccgaggaagcuauggggacgccucggauucagcaucugcucauccugcuugugcugggagccucccuccugaccucuggccuugagcuguacugccagaaggggcucagcaugacagucgaagcggacccggcuaacauguucaauuggaccacagaggaaguugagaccugugauaaaggagcccugugccaagagacaauucugaucauuaaggccggcaccgaaacggcuauccucgccaccaaaggguguauccccgagggagaagaggcuauuacaaucgugcagcacuccucuccucccggccugauugugaccagcuauuccaacuacugcgaggacagcuuuuguaaugauaaggacucucuuucccaguucugggaauuuagcgagacaaccgccucuacggucuccacaacccugcacugcccuacauguguggcgcucggaaccugcuucagcgcccccucucugccuuguccgaacgggaccacacgcugcuaucagggaaaacuugaaaucacgggcgggggaauugaguccagcguugaagugaagggcuguaccgcuaugaucgggugcagacugauguccggcauucucgccgucggccccauguuugugcgggaggcuugcccucaucaacugcugacacagccccgcaagaccgagaauggcgccacaugucucccuauccccguuugggggcugcagcuucugcucccgcugcuucugccuucuuucauccacuuuagcuga

SEQ ID NO: 3512 - RNA, 1590 nt, Artificial Sequence
  AHZ44440 variant
augcugcucgccgugcuguacugccuucuguggagcuuccagaccuccgcuggccacuuucccagagccugugucucuagcaagaaccucauggagaaagaaugcuguccuccgugguccggggaccggucucccugcggacaacugagcggccgcggguccugucagaauauccuucugucuaacgcgccucucggaccccaguucccuuuuacaggcguugaugacagagagagcuggcccuccguguucuauaaucggacgugccaguguagcgggaacuuuaugggauucaauugcggcaacuguaaguuuggcuucugggggccuaauugcaccgaacgcagacugcuggugcggcgcaacauuuuugaucucucugcuccggagaaagacaaguucuuugccuaccugacacuugccaaacauaccaucuccagcgauuaugucauucccaucggaacauacggccaaaugaagaaugggucuaccccuauguucaacgacauuaauaucuaugaucuguuuguguggaugcacuacuauguuuccauggacgcucuccugggaggcagcgaaaucuggagagauauugacuucgcccaugaggcucccgccuuccuuccuuggcaccggcuguuucuccugcgcugggagcaggaaauccagaagcugacaggggaugagaacuucaccauucccuacugggacuggagagaugcggaaaaaugugacaucugcacggacgaguacaugggaggccagcauccgaccaauccuaaccuccugucucccgccuccuuuuucagcuccuggcaaauugugugcucucggcuugaggaauauaauagccaccagucccuguguaacggcacaccugaggggccccuccgcagaaaccccggaaaucacgauaagagccggaccccucgccugccgucuuccgcugacgucgaauuuugccuuagccugacacaguacgagucuggcagcauggauaaagccgcuaacuucuccuuuagaaauacccucgaaggguucgccucuccccugacgggaaucgcggacgccagccaguccagcaugcauaacgcucugcacauuuauaugaauggcacaaugucucaagugcagggguccgccaacgauccuaucuuucuccugcaucacgcuuucguugacagcaucuuugagcaguggcuucggagacaccgcccccugcaagagguguacccugaagccaaugcccccauucggcauaacagagagucuuauauggucccguucaucccucucuaccgcaauggagacuuuuucauuuccagcaaggaucugggcuaugauuacuccuaccuucaggacucugaucccgacagcuuccaggacuauaucaaauccuaccuggaacaggcuucucggauuuggagcuggcuccugggcgcggccauggugggggcugugcugaccgcccuccuggccggacuugucucccugcucuguagacacaagcgcaagcaacugccugaggaaaaacagccccugcuuauggagaaggaggauuaucauagccucuaccagucucaccuguga

SEQ ID NO: 3513 - RNA, 1590 nt, Artificial Sequence
  AGV39051 variant
augcugcucgccgugcuguacugccuucuguggagcuuccagaccuccgcuggccacuuucccagagccugugucucuagcaagaaccucauggagaaagaaugcuguccuccgugguccggggaccggucucccugcggacaacugagcggccgcggguccugucagaauauccuucugucuaacgcgccucucggaccccaguucccuuuuacaggcguugaugacagagagagcuggcccuccguguucuauaaucggacgugccaguguagcgggaacuuuaugggauucaauugcggcaacuguaaguuuggcuucugggggccuaauugcaccgaacgcagacugcuggugcggcgcaacauuuuugaucucucugcuccggagaaagacaaguucuuugccuaccugacacuugccaaacauaccaucuccagcgauuaugucauucccaucggaacauacggccaaaugaagaaugggucuaccccuauguucaacgacauuaauaucuaugaucuguuuguguggaugcacuacuauguuuccauggacgcucuccugggaggcagcgaaaucuggagagauauugacuucgcccaugaggcucccgccuuccuuccuuggcaccggcuguuucuccugcgcugggagcaggaaauccagaagcugacaggggaugagaacuucaccauucccuacugggacuggagagaugcggaaaaaugugacaucugcacggacgaguacaugggaggccagcauccgaccaauccuaaccuccugucucccgccuccuuuuucagcuccuggcaaauugugugcucucggcuugaggaauauaauagccaccagucccuguguaacggcacaccugaggggccccuccgcagaaaccccggaaaucacgauaagagccggaccccucgccugccgucuuccgcugacgucgaauuuugccuuagccugacacaguacgagucuggcagcauggauaaagccgcuaacuucuccuuuagaaauacccucgaaggguucgccucuccccugacgggaaucgcggacgccagccaguccagcaugcauaacgcucugcacauuuauaugaauggcacaaugucucaagugcagggguccgccaacgauccuaucuuucuccugcaucacgcuuucguugacagcaucuuugagcaguggcuucggagacaccgcccccugcaagagguguacccugaagccaaugcccccauuggacauaaccgggagucuuauauggucccguucaucccucucuacagaaauggcgacuuuuucauuuccagcaaggaucugggcuaugauuacuccuaccuucaggacucugaucccgacagcuuccaggacuauaucaaauccuaccuggaacaggcuucucgcauuuggagcuggcuccugggggcggccauggugggagcugugcugaccgcccuccuggccggccuugucucccugcucugucggcacaagagaaagcaacugccugaggaaaaacagccccugcuuauggagaaggaggauuaucauagccucuaccagucucaccuguga

SEQ ID NO: 3514 - RNA, 1590 nt, Artificial Sequence
  AGV39049 variant
augcugcucgccgugcuguacugccuucuguggagcuuccagaccuccgcuggccacuuucccagagccugugucucuagcaagaaccucauggagaaagaaugcuguccuccgugguccggggaccggucucccugcggacaacugagcggccgcggguccugucagaauauccuucugucuaacgcgccucucggaccccaguucccuuuuacaggcguugaugacagagagagcuggcccuccguguucuauaaucggacgugccaguguagcgggaacuuuaugggauucaauugcggcaacuguaaguuuggcuucugggggccuaauugcaccgaacgcagacugcuggugcggcgcaacauuuuugaucucucugcuccggagaaagacaaguucuuugccuaccugacacuugccaaacauaccaucuccagcgauuaugucauucccaucggaacauacggccaaaugaagaaugggucuaccccuauguucaacgacauuaauaucuaugaucuguuuguguggaugcacuacuauguuuccauggacgcucuccugggaggcagcgaaaucuggagagauauugacuucgcccaugaggcucccgccuuccuuccuuggcaccggcuguuucuccugcgcugggagcaggaaauccagaagcugacaggggaugagaacuucaccauucccuacugggacuggagagaugcggaaaaaugugacaucugcacggacgaguacaugggaggccagcauccgaccaauccuaaccuccugucucccgccuccuuuuucagcuccuggcaaauugugugcucucggcuugaggaauauaauagccaccagucccuguguaacggcacaccugaggggccccuccgcagaaaccccggaaaucacgauaagagccggaccccucgccugccgucuuccgcugacgucgaauuuugccuuagccugacacaguacgagucuggcagcauggauaaagccgcuaacuucuccuuuagaaauacccucgaaggguucgccucuccccugacgggaaucgcggacgccagccaguccagcaugcauaacgcucugcacauuuauaugaauggcacaaugucucaagugcagggguccgccaacgauccuaucuuucuccugcaucacgcuuucguugacagcaucuuugagcaguggcuucaacggcacagaccccugcaggagguguacccugaagccaaugcccccauuggacauaaccgcgagucuuauauggucccguucaucccucucuaccggaauggcgacuuuuucauuuccagcaaggaucugggcuaugauuacuccuaccuucaggacucugaucccgacagcuuccaggacuauaucaaauccuaccuggaacaggcuucuagaauuuggagcuggcuccugggggcggccauggugggagcugugcugaccgcccuccuggccggccuugucucccugcucugucgccacaagcggaagcaacugccugaggaaaaacagccccugcuuauggagaaggaggauuaucauagccucuaccagucucaccuguga

SEQ ID NO: 3515 - RNA, 1590 nt, Artificial Sequence
  AGV39050 variant
augcugcucgccgugcuguacugccuucuguggagcuuccagaccuccgcuggccacuuucccagagccugugucucuagcaagaaccucauggagaaagaaugcuguccuccgugguccggggaccggucucccugcggacaacugagcggccgcggguccugucagaauauccuucugucuaacgcgccucucggaccccaguucccuuuuacaggcguugaugacagagagagcuggcccuccguguucuauaaucggacgugccaguguagcgggaacuuuaugggauucaauugcggcaacuguaaguuuggcuucugggggccuaauugcaccgaacgcagacugcuggugcggcgcaacauuuuugaucucucugcuccggagaaagacaaguucuuugccuaccugacacuugccaaacauaccaucuccagcgauuaugucauucccaucggaacauacggccaaaugaagaaugggucuaccccuauguucaacgacauuaauaucuaugaucuguuuguguggaugcacuacuauguuuccauggacgcucuccugggaggcuacgaaaucuggagagauauugacuucgcccaugaggcucccgccuuccuuccuuggcaccggcuguuucuccugcgcugggagcaggaaauccagaagcugacaggggaugagaacuucaccauucccuacugggacuggagagaugcggaaaaaugugacaucugcacggacgaguauaugggaggccagcauccgaccaauccuaaccuccugagccccgccuccuuuuucuccagcuggcaaauugugugcucccggcuugaggaauacaauucucaccagagccuguguaacggcacaccugaggggccccuccgcagaaaccccggaaaucacgauaagucccggaccccucgccugccgagcucugcugacgucgaauuuugccuuucccugacacaguaugagagcggcucuauggauaaagccgcuaacuucagcuuuagaaauacccucgaaggguucgccucuccccugacgggaaucgcggacgccucucagagcuccaugcauaacgcucugcacauuuacaugaauggcacaaugagccaagugcaggggucugccaacgauccuaucuuucuccugcaucacgcuuucguugacuccaucuuugagcaguggcuucggagacaccgcccccugcaagagguguauccugaagccaaugcccccauuggacauaaccgggagagcuacauggucccguucaucccucucuauagaaauggcgacuuuuucauuucuuccaaggaucugggcuacgauuacagcuaucuucaggacuccgaucccgacucuuuccaggacuacaucaaaagcuaucuggaacaggcuucccgcauuuggucuuggcuccugggggcggccauggugggagcugugcugaccgcccuccuggccggccuugucagccugcucugucggcacaagagaaagcaacugccugaggaaaaacagccccugcuuauggagaaggaggauuaccauucccucuaucagagccaccuguga

SEQ ID NO: 3516 - RNA, 714 nt, Artificial Sequence
  CAA04137 variant
augagcccccugugguggggcuuccuccuguccugccuuggguguaagauccugccuggagcccagggccaauuuccgagagugugcaugaccgucgacucucucguuaacaaagaguguugcccccggcugggggcugaaagcgccaauguguguggaucccagcagggccgcgggcagugcacagaggugagagcggauacgcggccuuggucuggacccuacauucuucgcaaccaagacgauagagaacuguggccucggaaguucuuucaccgcaccuguaaaugcacaggcaauuucgcuggcuauaacuguggggacugcaaguuuggauggaccggccccaauugugagcggaaaaagccuccggucaucagacagaacauucauagccucucuccccaggaacgcgagcaguuccugggggcccuggaucucgccaagaaaagagugcacccugacuacguuaucacaacccaacauugggugggacugcuuggccccaaugggacacagccucaguuugcuaacugcuccgucuaugauuucuuuguguggcugcacuacuauagcguucgggacacccuccugggaggcuucuuucccuggcuuaagguguacuauuaccgcuucgucauuggccugagaguguggcagugggaggugaucuccugcaaacucaucaagcgggccacgacccgccaaccguga

SEQ ID NO: 3517 - RNA, 1590 nt, Artificial Sequence; identical to SEQ ID NO: 3513
  AAA61242 variant

SEQ ID NO: 3518 - RNA, 1590 nt, Artificial Sequence
  AGV39054 variant
augcugcucgccgugcuguacugccuucuguggagcuuccagaccuccgcuggccacuuucccagagccugugucucuagcaagaaccucauggagaaagaaugcuguccuccgugguccggggaccggucucccugcggacaacugagcggccgcggguccugucagaauauccuucugucuaacgcgccucucggaccccaguucccuuuuacaggcguugaugacagagagagcuggcccuccguguucuauaaucggacgugccaguguagcgggaacuuuaugggauucaauugcggcaacuguaaguuuggcuucugggggccuaauugcaccgaacgcagacugcuggugcggcgcaacauuuuugaucucucugcuccggagaaagacaaguucuuugccuaccugacacuugccaaacauaccaucuccagcgauuaugucauucccaucggaacauacggccaaaugaagaaugggucuaccccuauguucaacgacauuaauaucuaugaucuguuuguguggaugcacuacuauguuuccauggacgcucuccugggaggcagcgaaaucuggagagauauugacuucgcccaugaggcucccgccuuccuuccuuggcaccggcuguuucuccugcgcugggagcaggaaauccagaagcugacaggggaugagaacuucaccauucccuacugggacuggagagaugcggaaaaaugugacaucugcacggacgaguacgugggaggccagcauccgaccaauccuaaccuccugucucccgccuccuuuuucagcuccuggcaaauugucugcucucggcuugaggaauauaauagccaccagucccuguguaacggcacaccugaggggccccuccgcagaaaccccggaaaucacgauaagagccggaccccucgccugccgucuuccgcugacguggaauuuugccuuagccugacacaguacgagucuggcagcauggauaaagccgcuaacuucuccuuuagaaauacccucgaaggguucgccucuccccugacgggaaucgcggacgccagccaguccagcaugcauaacgcucugcacauuuauaugaauggcacaaugucucaaguucagggguccgccaacgauccuaucuuucuccugcaucacgcuuucguggacagcaucuuugagcaguggcuucggagacaccgcccccugcaagaggucuacccugaagccaaugcccccauuggacauaaccgggagucuuauauggugccguucaucccucucuacagaaauggcgacuuuuucauuuccagcaaggaucugggcuaugauuacuccuaccuucaggacucugaucccgacagcuuccaggacuauaucaaauccuaccuggaacaggcuucucgcauuuggagcuggcuccugggggcggccauggugggagcuguccugaccgcccuccuggccggccuuguuucccugcucugucggcacaagagaaagcaacugccugaggaaaaacagccccugcuuauggagaaggaggauuaucauagccucuaccagucucaccuguga

SEQ ID NO: 3519 - RNA, 1590 nt, Artificial Sequence
  AGV39162 variant
augcugcucgccgugcuguacugccuucuguggagcuuccagaccuccgcuggccacuuucccagagccugugucucuagcaagaaccucauggagaaagaaugcuguccuccgugguccggggaccggucucccugcggacaacugagcggccgcggguccugucagaauauccuucugucuaacgcgccucucggaccccaguucccuuuuacaggcguugaugacagagagagcuggcccuccguguucuauaaucggacgugccaguguagcgggaacuuuaugggauucaauugcggcaacuguaaguuuggcuucugggggccuaauugcaccgaacgcagacugcuggugcggcgcaacauuuuugaucucucugcuccggagaaagacaaguucuuugccuaccugacacuugccaaacauaccaucuccagcgauuaugucauucccaucggaacauacggccaaaugaagaaugggucuaccccuauguucaacgacauuaauaucuaugaucuguuuguguggaugcacuacuauguuuccauggacgcucuccugggaggcagcgaaaucuggagagauauugacuucgcccaugaggcucccgccuuccuuccuuggcaccggcuguuucuccugcgcugggagcaggaaauccagaagcugacaggggaugagaacuucaccauucccuacugggacuggagagaugcggaaaaaugugacaucugcacggacgaguacaugggaggccagcauccgaccaauccuaaccuccugucucccgccuccuuuuucagcuccuggcaaauugugugcucucggcuugaggaauauaauagccaccagucccuguguaacggcacaccugaggggccccuccgcagaaaccccggaaaucacgauaagagccggaccccucgccugccgucuuccgcugacgucgaauuuugccuuagccugacacaguacgagucuggcagcauggauaaagccgcuaacuucuccuuuagaaauacccucgaaggguucgccucuccccugacgggaaucgcggacgccagccaguccagcaugcauaacgcucugcacauuuauaugaauggcacaaugucucaagugcagggguccgccaacgauccuaucuuucuccugcaucacgcuuucguugacagcaucuuugagcaguggcuucggagacaccgccugcuccaagagguguaccccgaagccaaugccccuauuggacauaaccgggagucuuauaugguccccuucaucccgcuguacagaaauggcgacuuuuucauuuccagcaaggaucuuggcuaugauuacuccuaccugcaggacucugauccugacagcuuccaggacuauaucaaauccuaccucgaacaggcuucucgcauuuggagcuggcugcugggggcggccauggugggagcugugcucaccgcccugcuugccggccuggucucccuccugugucggcacaagagaaagcaacugcccgaggaaaaacagccucuucucauggagaaggaggauuaucauagccuguaccagucucaccuguga

SEQ ID NO: 3520 - RNA, 1590 nt, Artificial Sequence
  AGV39086 variant
augcugcucgccgugcuguacugccuucuguggagcuuccagaccuccgcuggccacuuucccagagccugugucucuagcaagaaccucauggagaaagaaugcuguccuccgugguccggggaccggucucccugcggacaacugagcggccgcggguccugucagaauauccuucugucuaacgcgccucucggaccccaguucccuuuuacaggcguugaugacagagagagcuggcccuccguguucuauaaucggacgugccaguguagcgggaacuuuaugggauucaauugcggcaacuguaaguuuggcuucugggggccuaauugcaccgaacgcagacugcuggugcggcgcaacauuuuugaucucucugcuccggagaaagacaaguucuuugccuaccugacacuugccaaacauaccaucuccagcgauuaugucauucccaucggaacauacggccaaaugaagaaugggucuaccccuauguucaacgacauuaauaucuaugaucuguuuguguggaugcacuacuauguuuccauggacgcucuccugggaggcagcgaaaucuggagagauauugacuucgcccaugaggcucccgccuuccuuccuuggcaccggcuguuucuccugcgcugggagcaggaaauccagaagcugacaggggaugagaacuucaccauucccuacugggacuggagagaugcggaaaaaugugacaucugcacggacgaguacaugggaggccagcauccgaccaauccuaaccuccugucucccgccuccuuuuucagcuccuggcaaauugugugcucucggcuugaggaauauaauagccaccagucccuguguaacggcacaccugaggggccccuccgcagaaaccccggaaaucacgauaagagccggaccccucgccugccgucuuccgcugacgucgaauuuugccuuagccugacacaguacgagucuggcagcauggauaaagccgcuaacuucuccuuuagaaauacccucgaaggguucgccucuccccugacgggaaucgcggacgccagccaguccagcaugcauaacgcucugcacauuuauaugaauggcacaaugucucaagugcagggguccgccaacgauccuaucuuucuccugcaucacgcuuucguugacagcauguuugagcaguggcuucggagacaccgcccccugcaagagguguacccugaagccaaugcccccaucggacauaaccgggagucuuauauggucccguucauuccucucuacagaaauggcgacuuuuucaucuccagcaaggaucugggcuaugauuacuccuaccuucaggacucugaucccgacagcuuccaggacuauauuaaauccuaccuggaacaggcuucucgcaucuggagcuggcuccugggggcggccauggugggagcugugcugaccgcccuccuggccggccuugucucccugcucugucggcacaagagaaagcaacugccugaggaaaaacagccccugcuuauggagaaggaggauuaucauagccucuaccagucucaccuguga

SEQ ID NO: 3521 - RNA, 1614 nt, Artificial Sequence
  AAC15468 variant
augagcgcccccaagcugcucucccugggcugcaucuucuuuccucuucuccuguuccagcaagcuagagcccaguuuccgcggcagugugcgaccguggaggcucugcgcucugggaugugcugucccgaccuuagcccugucuccggacccggcacagauagaugcgggucuagcuccggacggggccgcugugaagccguuacggccgacucuagaccucacagcccccaguacccucaugaugggcgggacgaucgcgagguguggccgcugagauucuuuaaccggaccugccacuguaauggaaacuucuccggccauaauugcggcacaugucgccccggguggagaggagcugccugcgaccaacgggugcucauuguccgcagaaaccugcuggaucucagcaaagaagagaagaaucacuuugugcgggcucuggacauggccaaacgcaccacacauccucuuuucguuaucgcgaccagacggucugaagagauucugggccccgaugggaacacaccucaguuugagaauaucuccauuuauaacuacuucguguggacccacuauuacagcgucaagaaaacguuucucggagugggccaggaaucuuucggggagguugacuuuucccacgaaggacccgccuuccugaccuggcauagauaucaccuucugcgccucgagaaggauaugcaggagaugcugcaagaaccgagcuucucucugccuuacuggaauuuugcuacaggcaagaacgugugugacaucugcaccgaugaccucaugggcucccggagcaauuucgacuccacacugaucucucccaacagcgucuuuucccaguggagaguggugugcgauagccuugaggacuaugauacccuggggacgcucuguaauucuacagaagacggaccuauucgccggaaccccgccggcaaugucgcuagacccaugguucagcgccugccugagccgcaggauguggcccaaugccuugaaguggggcuguucgacacacccccuuuuuacuccaacagcaccaacucuuuccggaauaccgucgagggauacagcgaucccaccggcaaauaugacccugcggugagaucccuccauaaccuggcccaccuguuucucaaugggacaggaggccagacgcaccugucucccaacgauccgaucuucguucuucugcauaccuuuacagacgcuguguucgaugaguggcuccgccgguacaaugccgacauuagcaccuuuccucuggaaaacgcucccaucggccacaauagacaguauaacauggucccuuucuggcccccugugacaaauaccgagauguuuguuacggcccccgacaaccuuggguacacauaugaaauucaauggccgucccgcgaguucagcgugccugaaaucauugccaucgcugucgugggagcgcugcuccuggucgcccugaucuucggcaccgcuucuuaccucauucgggccagacgguccauggaugaggccaaucagccccugcuuaccgaccaguaucaguguuacgcugaggaauacgagaagcugcaaaaccccaaucagagcgugguuuga

SEQ ID NO: 3522 - RNA, 1560 nt, Artificial Sequence
  AAA20870 variant
augagcccccugugguggggcuuccuccuguccugccuuggguguaagauccugccuggagcccagggccaauuuccgagagugugcaugaccgucgacucucucguuaacaaagaguguugcccccggcugggggcugaaagcgccaauguguguggaucccagcagggccgcgggcagugcacagaggugagagcggauacgcggccuuggucuggacccuacauucuucgcaaccaagacgauagagaacuguggccucggaaguucuuucaccgcaccuguaaaugcacaggcaauuucgcuggcuauaacuguggggacugcaaguuuggauggaccggccccaauugugagcggaaaaagccuccggucaucagacagaacauucauagccucagcccccaggaacgcgagcaguuccugggggcccuggaucucgccaagaaaagagugcacccugacuacguuaucacaacccaacauuggcugggacuucugggccccaaugggacacagccucaguuugcuaacugcucuguguaugauuucuuugucuggcuccacuacuauagcgugcgggacacccugcuuggacccggccgcccguacagagccauugauuucucccaucagggcccugcuuuuguuacguggcaccgguaucaucugcucugccuggagcgcgaccugcaaagacucaucgggaaugaauccuucgcccugcccuacuggaacuuugcgaccggacggaaugagugugaugugugcacagaccagcuuuucggcgccgcuagaccugaugaccccacccugaucucucgcaacucccgguucagcucuugggaaacagucugugacucccucgaugacuacaaucaccuggugacccuuugcaacgggacguaugagggacugcucagacgcaaucagaugggccggaacagcaugaagcugcccacacugaaagauauuagagacugucucucucugcaaaaguuugauaacccuccguucuuucaaaauuccaccuucagcuuucgcaacgcccuugagggguucgacaaagcugauggaacacuggacucccaggugaugucucuccacaaucugguccauagcuuucuuaacggcaccaaugcccugccccacuccgcggccaacgauccuaucuucguugugcuccacagcuuuaccgacgcuauuuucgaugaauggaugaagcgguuuaaucccccugccgacgcuuggccccaggagcuggccccgaucggccauaacagaauguacaauauggugccuuucuuucccccugucacaaacgaggaacuguuccucacgucugaccagcugggguauuccuacgccauugaucuucccgugagcguugaagagaccccuggauggcccacaacccugcucguggucaugggcacacugguggcucugguugggcuuuucgugcuccuggcguuucugcaguaucgccggcucagaaagggauacaccccgcugauggagacgcaccuuucuagcaaacgcuauacagaagaggccuga

SEQ ID NO: 3523 - RNA, 456 nt, Artificial Sequence
  CCDS7679.1 variant
augagacggcugcuccuggugaccagccuugucguugugcugcucugggaggccggcgcugugcccgccccuaaggucccgaucaaaaugcaagugaagcacuggcccuccgaacaggacccugagaaagcguggggagcucgcguuguggaacccccugagaaggaugaccagcuggucgugcuuuuccccguucagaaaccuaagcugcucacaacggaagagaagccgagagggcagggccgggggcccauucugccuggaaccaaagccuggauggagacagaagauacccugggccaugugcucucucccgagccugaccacgauagccuguaccaucccccgccugaagaggaccaaggggaggaacgccccagacuuugggucaugccuaaccaccaggugcugcucggacccgaggaagaucaggaccauaucuaucacccccaguga

SEQ ID NO: 3524 - RNA, 525 nt, Artificial Sequence
  ACF47598 variant
auggugagcuacugggacaccggcguccugcucugcgcccugcuuuccugucugcuccugacagggucuagcuccggaucuaaacuuaaggaucccgagcugagccucaagggcacgcagcacaucaugcaagcugggcagacccugcaucugcagugcagaggagaagccgcgcacaaauggucccucccugagaugguuucuaaggaaagcgagcggcuguccauuacaaaaagcgcuuguggccgcaacgggaagcaguucugcucuacccuuacacugaauaccgcccaagccaaccauacaggauuuuauuccuguaaguaccucgcugugccgaccagcaaaaagaaagaaacggagucugccaucuauauuuucaucuccgacaccggcagacccuuuguggagauguacagcgaaauuccugagaucauccacaugacagaaggccgggagcuggucauucccugccgcgugaccucuccuaauaucacaguuacccuuaagaaaaagaaggcuuga

SEQ ID NO: 3525 - RNA, 750 nt, Artificial Sequence
  BAR92607 variant
augggcagcgacgugagagaucugaacgcccuccugcccgcugucccuucccuugggggaggcgggggaugcgcccugccgguuucuggcgcggcucagugggcccccgugcucgacuucgccccucccggggcuagcgccuacggaucccugggcggcccugcucccccuccggcgcccccucccccucccccgccucccccucacucuuuuaucaagcaagagcccagcuggggaggggccgaaccccaugaggaacagugucuuuccgccuucaccgugcacuuuucuggccaguucacagggacggcuggagccugccgguauggcccuuuugggccgcccccucccagccaggcuuccagcggacaagcccgcauguucccuaaugcgcccuaccugccgucuugucucgagucccagccugccauuagaaaccagggcuauagcaccgucacauuugauggcacccccucuuacgggcauacaccuucccaccaugcugcccaguuccccaaucacagcuuuaaacacgaagacccuaugggacaacagggcucucugggggagcagcaguauuccgugcccccgccuguuuacggaugccauacccccacagauagcuguaccggcucccaagcucugcuccugcggacgcccuauucuagcgacaaccuuuaccagaugaccucccagcuggagugcaugacauggaaucaaaugaaccucggggccacccugaagggauga

SEQ ID NO: 3526 - RNA, 1350 nt, Artificial Sequence
  AAA61299 variant
augggcagcgacgugagagaucugaacgcccuccugcccgcugucccuucccuugggggaggcgggggaugcgcccugccgguuucuggcgcggcucagugggcccccgugcucgacuucgccccucccggggcuagcgccuacggaucccugggcggcccugcucccccuccggcgcccccucccccucccccgccucccccucacucuuuuaucaagcaagagcccagcuggggaggggccgaaccccaugaggaacagugucuuuccgccuucaccgugcacuuuucuggccaguucacagggacggcuggagccugccgguauggcccuuuugggccgcccccucccagccaggcuuccagcggacaagcccgcauguucccuaaugcgcccuaccugccgucuugucucgagucccagccugccauuagaaaccagggcuauagcaccgucacauuugauggcacccccucuuacgggcauacaccuucccaccaugcugcccaguuccccaaucacagcuuuaaacacgaagacccuaugggacaacagggcucucugggggagcagcaguauuccgugcccccgccuguuuacggaugccauacccccacagauagcuguaccggcucccaagcucugcuccugcggacgcccuauucuagcgacaaccuuuaccagaugaccucccagcuggagugcaugacauggaaucaaaugaaccucggggccacccugaagggaguggccgcuggcucuagcuccagcgucaaauggacagaaggccagucuaaucacagcaccggguacgaguccgauaaccauacgacaccuauccuuuguggagcgcaguaucgcauucacacccacggcguguucagagggauccaggacguucggcgcgugccgggagucgcccccacacuggugagaucugcuagcgaaaccuccgagaagcggccuuuuaugugcgccuaccccggcuguaauaaacgcuauuucaagcucagccaucugcaaaugcacucuagaaagcauaccggggagaaaccuuaccagugcgauuuuaaggacugugaacggcgcuucuccagaagcgaucagcugaaacggcaccagcgcagacauacaggcgugaagcccuuccaaugcaaaacgugccagcggaaguuuucuagauccgaccaccucaagacccacacacgcacccauacaggaaaaaccagcgagaagccuuucuccugucgguggcccucuugccagaaaaaguuugccagaagcgaugaacugguccgccaccauaacaugcaccagcggaauaugacgaaacuucaacuggcucucuga

SEQ ID NO: 3527 - RNA, 279 nt, Artificial Sequence
  AAA63269 variant
augcagagacggggccaaccccuggagaaccacguggcccucauccauuggcagagcgcugggauuccugccuccaagguccacaauuacugcaacaugaaaaagucucgccugggaagaagccgggcgguucgcaucucccagccgcuucugucucccagacgguguccucuccaucugaccgaacgcggcgcugggcuucugcagccccaaccucagggacccgugagaacaccuggcccgcccagcgggucccacccugccgccgcugacaauuga

SEQ ID NO: 3528 - RNA, 246 nt, Artificial Sequence
  AAP35763 variant
auggagagccccaagaaaaagaaccagcaacugaaagugggcauccuccaccugggguccagacagaagaaaauucggauccagcuucgcucucagugcgccaccuggaaggucauuuguaagagcugcaucucccaaacaccuggaauuaaucuggaccucggcucugggguuaaagugaagaucaucccgaaagaggaacauuguaagaugcccgaagcuggagaggaacagccucagguguga

SEQ ID NO: 3529 - RNA, 1098 nt, Artificial Sequence
  AAA59652 variant
auggcaguaauggcaccaagaacucuacuauuauuauuaucuggugcguuagcauuaacacaaacuugggcagguagucauucaaugagauacuuuuuuacaucaguaucaagaccaggacgaggagaaccaagauucauagcaguaggauauguagaugauacacaauuuguaagauuugacagcgaugccgcuucacaaaaaauggaaccaagagcaccauggauagaacaagaaggaccagaauauugggaccaagaaacuagaaauaugaaagcccacagucaaacagauagagcaaauuuaggaacucuaagaggauauuauaaucaaucagaagauggaucacauacaauacaaauaauguacggaugugacguuggaccagauggacgauuuuuaagaggauauagacaagaugcauaugauggaaaagauuauauagcauuaaaugaagauuuaagaucauggacagcagcagauauggccgcacaaauuacaaaaagaaaaugggaagcaguacaugcagcagaacaaagaagaguauaucuagaagguagauguguagacggacuuagaagauauuuagaaaauggaaaagaaacacuacaaagaacagauccuccaaaaacacauaugacacaucauccaauaucagaccaugaagcuacauuaagauguugggcacuaggauuuuauccagcugaaauaacacuaacauggcaaagagauggagaagaucaaacacaagauacagaacuaguagaaacaagaccugcaggagauggcacauuucaaaaaugggcagcaguagucgugccuucaggagaagaacaaagauacacaugucauguacaacacgagggauuaccaaaaccauuaacauuaagaugggaacuaaguucacaaccaacaauaccaaucguuggaauaauagcuggauuaguauuauuaggagcaguuauuacuggugcaguaguagcagcaguaauguggagaagaaaaagcagugauagaaaaggaggaagcuacacacaagcagcaucuucagauucagcacaaggaucagauguaagcuuaacagcauguaaaguauaa

SEQ ID NO: 3530 - RNA, 1098 nt, Artificial Sequence
  AAA59606 variant
auggcagucauggcaccaagaacuuuaguacuauuacuaucuggagcacuugcuuuaacacaaacaugggcaggaucacauagcaugagauauuucuuuacaaguguaaguaggccaggaagaggagaaccacgauuuaucgcaguaggauauguagacgauacucaauucguuagauuugauucugaugcagcaagccaaagaauggaaccaagagcaccauggauagaacaagaaggaccugaauauugggacggugaaacaagaaaaguuaaagcacauagucaaacacacagaguagauuuaggaacauuaagagguuauuauaaucaaucagaagcaggaucacauacaguacagagaauguauggaugugauguaggaucagacuggagguuccuacgaggauaucaucaauacgcauaugacgguaaagacuacauagcauugaaagaagauuuaagaaguuggacagcagcugauauggcugcacaaacaacuaaacacaaaugggaagcagcacauguagcugaacaauuaagagcauauuuagaaggaacauguguagaauggcuaagaagauauuuagaaaauggaaaagaaacuuuacaaagaacagaugcuccaaaaacacacaugacacaucaugcaguaagugaucaugaagcaacauuaagauguugggcauuaaguuucuauccagcagaaauaacuuuaacauggcaaagagauggagaagaccaaacacaagauacugaauuaguagaaacaagaccagcaggagauggaacauuucaaaaaugggcagcaguaguaguuccaagcggacaagaacaaagauauacaugucauguacaacaugaaggacuaccaaaaccacuuacacuaagaugggaaccaagcucacaaccgacaauaccuauaguaggaauuauugcuggauuaguacuauuuggagcaguaauaacaggagcuguaguagcagcagugauguggcgacgaaaaucaagugauagaaaaggaggaaguuauagccaagcagcaaguucagauagcgcacaaggaucagacguaucauuaacugcaugcaaaguauaa

SEQ ID NO: 3531 - RNA, 1263 nt, Artificial Sequence
  AAH37161 variant
augccuggcggcugcaguagagguccagcagcuggcgacggaagauuaagauuagcuagauuagcucuaguacuacuuggauggguaucaucaucaucaccaacaucuucagcaucaucauucaguucaucagcaccauuccuagcaucagcugucucagcucaaccaccacuaccagaucaauguccagcacuaugugaauguucagaagcagcaagaacuguuaaaugcgucaauagaaacuugacagaagucccaaccgaucuaccagcauauguacguaaccuuuuccuaacgggaaaucaacuagcaguacuaccagccggcgcuuucgcaagaagacccccauuagcagaauuagcagcauuaaacuuaucaggaucacgcuuagaugaaguacgugcaggagcauuugaacaucuuccuucuuuacgacaacuagaucuaucacacaaucccuuagcagaucuaucaccauuugcauuuucaggaucaaaugcauccguaucugcuccaucaccauuaguagaauuaauacuaaaccauauaguacccccugaagaugaaagacaaaauagaucauuugaaggcauggucguagcagcacuacuugcuggaagagcacuacaaggucucagacgacucgaacuagcaucaaaucacuuuuuauaucuaccuagagauguacuagcacaauuaccaucucuacgacauuuagaucuauccaacaauucauuaguuucacucacauauguauccuuuagaaaucuaacucaucuugaaucucuacauuuagaagacaaugcauuaaaaguacuacauaacggaacacuagcagaauuacaaggacuuccacauauaagagucuuuuuagacaacaacccauggguaugcgauugccacauggcagacaugguaacaugguuaaaagaaacagaaguaguacaaggaaaagacagacuaacaugcgcauaccccgaaaaaaugagaaacagaguacuauuagaacuuaauucagcagaucuagauugugauccaauucuaccaccuucacuacaaacaucauacguauuucuagguauaguauuagcauuaauuggagcaauauuuuuacuaguuuuauaucuaaacagaaaaggaauaaaaaaauggaugcauaauauaagagaugcauguagagaucacauggaagguuaccauuaucgauaugaaauaaaugcagauccacguuuaacuaauuuaucaucaaacucagacguauaa

SEQ ID NO: 3532 - RNA, 1632 nt, Artificial Sequence
  AAH33010 variant
augagaaaacccgccgcaggauuccuaccaucacuucuaaaaguacuauuacuccccuuagcuccagcagcagcacaagauucuacacaagcauccacucccggaucgccauuauccccaacagaauaugaaagauuuuucgcacuucuaaccccaacuuggaaagcugaaacuacauguagauuaagagcaacacacgguugcaggaaucccacccuaguacaauuagaccaauacgaaaaucacggccuaguaccagacggagccguauguucaaacuuaccauaugccucaugguucgaauccuucugucaauuuacacauuaccgaugcuccaaucaugucuacuaugcaaaacgcguacuaugcucccaaccaguaucaaucuuaucaccaaauacacuuaaagaaauagaagcaucagccgaaguaucccccaccacaaugacaucaccaauaaguccacauuucacaguaacagaaagacaaacauuccaaccguggccagaaagauuaucuaacaauguagaagaacuacuacaauccagucuaagccucggaggacaagaacaagcaccagaacauaaacaagaacaaggaguagaacacagacaagaaccuacacaagaacacaaacaagaagaaggacaaaaacaagaggaacaagaagaagaacaagaagaggaaggaaaacaagaagaaggacaaggaacaaaagaaggacgagaggcaguaucccaauuacaaacagacucagaaccaaaauuccauucagaaucauugagcuccaacccaucauccuucgcaccaagaguccgagaagucgaaucaacaccaaugauaauggaaaacauacaagaauuaauuagaucagcacaagaaauagacgaaaugaacgaaaucuacgaugaaaacuccuacuggagaaaccaaaauccaggaucauuauuacaacuaccucauacagaagcacuucuaguucuuugcuacucaauagucgaaaacacauguauaauaacaccaacugcuaaagcauggaaauacauggaagaagaaauauuaggauuuggcaaaagcguaugcgacucucuaggaaggagacauaugaguacaugugcucuaugugauuuuuguucauuaaaacuagaacaaugucacucagaagcauccuuacaaagacaacaaugugauacaucucacaaaaccccguucguaucaccuuuacuagcuucccaaucucucucaauaggaaaccaaguuggaaguccagaauccgguagauucuauggauuagauuuauacggaggccuucauauggauuucuggugcgcaagauuagcaaccaaaggcugugaagauguacguguaucaggaugguuacaaacagaauuucuuucuuuucaagauggagacuuuccuacaaaaauaugcgacacagacuauauccaauacccaaacuacugcaguuuuaaaucacaacaaugcuuaaugcgaaacagaaauagaaaaguaucacgaaugagaugccuacaaaacgaaaccuauucagcacuaucacccggaaaaucagaagacguaguccuaagauggucacaagaguucuccaccuuaacacuaggucaauucggcuaa

SEQ ID NO: 3533 - RNA, 1830 nt, Artificial Sequence
  AAB58754 variant
augaaauggguagaaagcauuuuccuaaucuuccuauuaaacuuuacagaaucaagaacauuacacagaaacgaauacggaauagcaaguauucuagauucauaccaaugcacagcagaaaucagucuagcagaccuagcaacaauauucuucgcccaauucguacaagaagcaacauauaaagaaguauccaaaaugguuaaagaugcuuuaacugcaauagaaaaaccuacaggagacgaacaaucuucaggaugccuagaaaaucaacuucccgcauuccuagaagaacuuugucaugaaaaagaaauucuagaaaaauacggucacucugacugcugcucccaaucagaagaaggcagacauaauuguuuccucgcacacaaaaaaccaacccccgcaucaaucccauuauuucaaguaccagaaccaguaacauccugcgaagcuuaugaagaagaccgagaaacauucaugaacaaauuuauuuacgaaauugcccgacgacaucccuuccuauaugcaccaacaauacuccuaugggccgcaagguacgacaaaauaauaccaucaugcuguaaagcagaaaacgcaguagaaugcuuccaaacaaaagcagcaacagucacaaaagaacuuagagaaucaucccuacuaaaccaacaugcaugugccguaaugaaaaauuucgguaccagaacauuucaggcaauaacagucacaaaauuaucacaaaaauucaccaaaguuaauuuuacagaaauacaaaaauuaguucuugacguagcgcauguacaugaacauuguuguagaggagauguauuagauugccuucaagauggagagaaaauaauguccuauauauguucacaacaagacacacuuucaaacaaaaucacagaauguugcaaacuaacaacacuagaacgaggacaaugcaucauacaugcagagaaugacgaaaaaccagaaggacuuucaccaaauuuaaacagauuccuaggugauagagauuucaaucaauucucauccggugaaaaaaauauuuucuuggcaaguuuuguacacgaauauucccgaagacacccucaacuagcaguuucaguaauacugagaguagcaaaaggcuaucaagaacuacuagaaaaauguuuucaaacagaaaauccacuagaaugucaagauaaaggagaggaagaauuacaaaaauacauacaagaaagccaagcccuagcaaaaagaucaugcggauuauuucagaaacucggagaauauuaccuacaaaacgcauuuuuaguagcauauacuaagaaagcgccucaauuaacauccucagaauuaauggcaauaacgaggaaaauggccgcaacagccgcuacauguugucaauuaagugaagacaaauuacuagcaugcggagaaggagcagcagacauaauaauuggccauuugugcauaaggcacgaaaugacaccaguaaaucccggaguaggacaaugcugcaccucuuccuacgcaaacagacgaccuuguuucucaucacuaguaguagaugaaacauacguaccacccgcuuucucagacgacaaauucauauuucacaaagaucuuugucaagcacaaggaguagccuuacaaacaaugaaacaagaguucuuaauaaacuuagucaaacaaaaaccccaaauaacagaagaacaacuagaagcugucauagcagacuuuucuggacuacuagaaaaaugcugccaaggacaagaacaagaaguauguuucgcagaagaaggucaaaaacucauuuccaaaacacgggcagcacugggaguauaa

SEQ ID NO: 3534 - RNA, 2565 nt, Artificial Sequence
  AAI26251 variant
augauggcauauucagauacaacaaugaugagcgaugacauagacuggcugcgcucacaccgagggguauguaaaguagacuuauauaacccagaagggcaacaagaucaagacagaaaagugauauguuucguagauguaucaacacuuaacguagaagacaaggacuacaaagaugcagcaucaucaucaagugaaggaaaucuaaacuuaggaagccuagaagaaaaagaaauaauaguuauaaaagacacagaaaagaaagaucaauccaaaacagaaggcucuguaugucuauuuaaacaggcaccauccgacccagucucaguccuaaauuggcuacuaucugauuugcaaaaauaugcacucgguuuucaacacgcguuaucuccaaguacaucgacuugcaaacauaaaguaggagacacagaaggagaauaccauagggcauccucagagaauuguuacucuguuuacgcagaccaaguaaacauagauuacuuaaugaauagaccacaaaauuuaagauuagaaaugaccgcagcuaaaaauacaaacaacaaucagagcccuagugcgccgccagcaaaaccacccaguacgcaaagagccguaauaagccccgacggagaauguagcauagaugacuuaaguuuuuauguaaauaggcuaaguagccucguaauccaaauggcucacaaagaaauaaaagaaaaacuagaggguaaaucgaaaugccuacaccacucaauaugucccagccccggcaauaaggaacggauaaguccacguacucccgcaucaaaaauagccucagaaauggcguaugaagcgguagaacuaacagcugcggaaaugagaggaacaggagaagaaucaagagaagguggacaaaagagcuuucuuuacagugaauuaucgaauaaaucaaaaucuggagacaaacaaaugucacaaagagaaucaaaagaguucgcugacagcaucucaaaaggacuaaugguauacgccaaucaaguugcuucagauaugauggugaguuugaugaaaacauuaaaaguacauuccucuggaaaaccaaucccugcaucaguaguauuaaaaagaguacuacuaagacacaccaaagaaauaguuagcgaccuuaucgauuccugcaugaaaaacuuacacaauaucacgggaguauuaaugacugauuccgauuucguaucagcuguaaagagaaaccuauuuaaucaauggaaacaaaaugcaacagauauaauggaagcaaugcuaaaaagauuaguuucugcacuaauaggcgaagaaaaagaaacuaaaucacaauccuuaucauaugccucccuaaaagcaggaucacaugauccuaaauguagaaaccagucccucgaguucucuacaaugaaggcagaaaugaaagaaagagauaaagguaaaaugaaaucagacccuuguaaaagucuaaccucagccgaaaaaguaggagaacacauacugaaagaaggcuuaaccauauggaaucaaaaacaaggaaauagcugcaaaguagcaacaaaggcuugcucaaauaaagacgagaaaggcgagaaaaucaaugcaucaacggacucacuagcaaaagaucuaauagucucagcucuaaaacuuauacaauaccauuuaacucaacaaacuaaaggaaaagauacuugugaagaagauuguccaggauccacaauggguuacauggcccaaagcacucaauaugaaaaaugcggaggaggacaaucugcaaaagcacucucaguaaaacaauuagaaucacauagagcaccaggaccaucaacuugccaaaaagaaaaucaacaccuugauucucagaaaauggacaugucaaacauaguucuaauguuaauacaaaaauuauuaaaugaaaauccauuuaagugugaagauccaugcgaaggugaaaacaaaugcucagaaccucgcgcauccaaagcagcaucaaugagcaauagaagcgauaaggcagaagaacaaugccaagaacaccaagaacuagauuguacaaguggaaugaaacaagcaaacggucaauuuauagacaaauuagucgaaagcgucaugaaacuuuguuuaauaauggcaaaauauucaaacgauggagcagcucuagcagaacuggaagaacaagccgcaucugcaaauaaaccgaauuuuagagguacaagaugcauucacucuggagcaaugccacaaaacuaccaagauaguuuaggacaugaagucauaguuaauaaccaauguucaacaaauuccuuacaaaaacaacuucaagcaguucuacaauggauagcagcaucacaauuuaaugugccaaugcuauacuucaugggagauaaagauggucaauuagaaaaacuaccacaaguaucagccaaagccgcggaaaaaggauacucaguaggcggacuauuacaagaaguuaugaaauuugcgaaagaaagacaaccagacgaagcuguuggaaaaguagcaagaaaacaauuauuagacuggcuacuagcaaaucuuuaa

SEQ ID NO: 3535 - RNA, 1251 nt, Artificial Sequence
  BAG61782 variant
augguagacuaucacgcagcaaaccaaucauaccaauauggaccaucuagcgccggaaacggagcagggggcggaggaucaaugggagauuacauggcgcaagaagacgacugggacagggaccuauuacuagaucccgcaugggaaaaacaacaaagaaaaacauuuacagcauggugcaacagccauuuaagaaaagcaggaacacaaauagaaaacauagacgaagacuucagagauggacuaaaauuaaugcuauuacuagaaguaauauccggagaaagauuaccaaaaccagaaagagguaaaaugagaguucacaaaaucaacaacguaaacaaagcauuagauuucauagcaucaaaaggcguaaaacuagucucaauaggagccgaagaaauaguagacgguaacgcaaaaaugacucuaggaaugauauggacaauaauacuacgauucgcuauacaagauauaucagucgaagaaacaucagcaaaagaaggacuucuuuuauggugccaaagaaaaacugcaccauacaaaaacguuaacguucaaaacuuccauauaagcuggaaagauggacuagcauucaacgccuuaauccauagacacagaccagaauuaaucgaauacgacaaacuaagaaaagaugauccagugacaaauuuaaauaacgcauucgaaguagcagaaaaauaccuagacauacccaaaauguuagaugcagaagauauaguaaauacagcaagaccagacgaaaaagcaauaaugacauacguaucaucauucuaccacgcauuuuccggagcacaaaaagcagaaacugcagcaaacagaauaugcaaaguauuagcagucaaccaagaaaaugaacaucuaauggaagacuaugaaaaacuagcaucagacuuauuagaauggauaagaagaacaaucccaugguuagaggacagaguaccacaaaaaacaauccaagaaaugcaacaaaaacucgaagauuuuagagauuacagaagaguacacaaaccaccaaaaguacaagaaaaaugucaacuagaaauaaacuucaacacauuacaaacaaaauuaagauuaucaaacagaccagcauucaugccaucauggagaucuagagcaaguucaucgccaacaaguacaugcgcagcaucaagcccagcaagaccaauguuauggggaccaggaucaagacccagauggagaagaaguggagcaucaccacuaagauaa

SEQ ID NO: 3536 - RNA, 1689 nt, Artificial Sequence
  BAG65349 variant
augguagauuaccacgccgcaaaccaaucauaucaauacggaccauccuccgcaggaaauggagcgggugggggaggcucaaugggagacuauauggcacaagaagaugauugggauagagaccuacuccucgacccagcgugggaaaaacaacaaagaaaaaccuuuacugcaugguguaacucacauuuaagaaaggcaggaacacaaaucgaaaauauagaugaagacuuuagagauggccuaaaacuaauguuauuauuagaagucauaucaggggaaaggcuaccaaaaccagaaagaggcaaaaugcgagugcacaaaauaaauaaugugaacaaagcacuagauuuuauagcaucaaaaggagugaagcuaguaucaauaggagcagaagaaauaguagacgggaaugcaaaaaugacucuaggcaugauauggacaauaauauuaagauuugcaauacaagauauaaguguagaagaaacaucagcaaaagaaggacuacuucuauggugccaacgaaaaacagcaccauauaaaaauguaaacguacaaaauuuucacauauccuggaaagaugguuuggcauucaaugcucucauacacagacacagaccugaacuaauagaauaugauaaacuaagaaaagaugacccagugaccaacuuaaacaacgcauucgaagucgcugaaaaauaucuagauauuccgaaaaugcucgaugcagaagauauaguaaauacagcuagaccagaugaaaaagccauuaugacauacguaagcagcuucuaccacgcauuuagcggagcacagaaagcagaaacagcagcuaauagaaucuguaaaguacuagccguaaaccaagaaaaugaacaccuaauggaagacuacgagaagcuagcaucagauuugcuagaauggauacaaagaacaauaccuuggcuagaagacagaguaccacaaaaagcaauacaagaaaugcaacaaaaauuagaagauuucagggauuauagaagaguacauaagccaccaaaaguacaagaaaaaugucaacuagaaauaaauuucaauacauuacaaacaaaacuuagacuaaguaacagaccagcauucaugccaucagaaggaaaaaugguaagugauauaaauaacggauggcaacacuuagaacaagcagagaaagguuacgaagaaugguuacugaacgaaauaagaagauuagaaagguuagaccacuuagcagaaaaauucagacaaaaagccucaauacaugaagcauggaccgauggaaaagaagcaauguuaaaacacagagauuacgaaacagcaacauuaucagacaucaaagcacuaauaagaaaacaugaagcauucgaaagcgaucuagcagcacaccaagauagaguagaacaaauagcagcaauagcacaagaauuaaaugaacuagauuacuacgacucccauaaugucaauacaccagacggacuacaagaaggaccuggacaaccacauucaccaauaccucccuuauguauauacgcaaaacauaguuuacaaucuagcggaguuggaggaugggcaggaagaggauggggaagacuaucacccuuaucacuaugcggacuagcaagaagguucccuaggccaggauggggagauuuaggacccgcauuauuaguaugguaa

SEQ ID NO: 3537 - RNA, 2736 nt, Artificial Sequence
  AAH05033 variant
augguagauuaucacgcagcuaaccaaucauaucaauacggaccaucaagcgcaggcaacggcgcaggaggaggaggauccaugggagauuacauggcucaagaagacgacugggaccgagaccuacugcuugauccagcaugggaaaaacaacaaagaaaaaccuucacagcuugguguaauagccaucuccggaaagcaggaacucaaaucgaaaacauagaugaagacuuuagagacggacuaaaauuaaugcuucuacuagaaguaauaagcggagaaagacucccaaaaccagaacgaggaaaaaugagaguacacaagauaaauaaugucaauaaagcacuagauuuuauagcgucaaaaggaguaaagcuagucucaaucggagcagaagaaauuguggacggaaacgcaaaaaugacccuaggaaugauauggacaauaauccugcgauuugcaauacaagauauaucaguagaagaaacaucagcaaaagaaggacuauuauuauggugccagaggaaaacagcaccauauaaaaauguaaauguucaaaauuuccauauaaguuggaaagacggacuagcauucaacgcauuaauacauagacacagaccagaauuaauagaauacgauaaacuucguaaagacgauccaguuacuaaucuaaacaaugccuuugaaguugcggaaaaauauuuagauauuccaaaaaugcuagacgcagaagauauaguaaacacugcaagaccagacgaaaaagcgaucaugacauauguguccucauuuuaccaugcauucucaggcgcacaaaaagcagagaccgcagcaaauagaaucuguaaaguacuagccguuaaucaagaaaacgaacacuuaauggaagauuacgaaaaacuagcaucagacuuacucgaguggauuagacgaacuauaccauggcuagaagauagaguaccucagaaaacaauccaagaaaugcaacaaaaacuagaggauuuuagagauuaucguagaguccauaaacccccaaaaguccaagaaaaaugucaauuagaaauaaacuucaacacacuacaaacaaaacugagauuaaguaauagaccagcauuuaugccaagcgaagguaaaaugguaagugacaucaauaauggauggcaacaucuagaacaagcugaaaaaggauacgaagaauggcuauuaaacgaaaucagaagauuagaacgacuagaccacuuagcagaaaaauuuaggcaaaaggcuucaauccaugaagcauggacagaugguaaagaagcaaugcugaaacauagagacuacgaaacagcaacccuaucugauauuaaagccuuaauucgcaaacacgaagcauucgaaucagaucuagcagcacaccaagacagaguagagcaaauagcggccauugcucaagaauuaaacgagcuagauuacuaugacagccacaacguaaacacaaggugucagaaaauaugcgaucaaugggacgcacugggaucauuaacucauagcagacgugaagcucuagagaaaacagaaaaacaauuagaagcaaucgaccaacuacauuuggaauacgcaaaaagagcagcaccauucaauaauuggauggaaucggccauggaagaucuucaagacauguucauaguacauacaauagaagaaauagaaggauuaauuucagcccaugaucaauuuaaaagcacauuaccagacgccgaucgagaaagagaagccauauuagcaauacacaaagaagcucaacgaauugcugaaaguaaccacauuaaauuaucagggagcaacccauacacaaccguuacaccacaaauaauaaacuccaaaugggagaaaguacaacaauuaguuccaaaaagggaccaugcacuauuagaagaacagagcaaacaacagucaaaugagcaucuacgacgacaauuugccagucaagcaaacguaguaggacccuggauacaaacaaaaauggaagagauuggaagaaucaguauagaaaugaacggaaccuuggaagaccaauuaucacacuuaaaacaauaugaaagaaguauuguagacuacaaaccaaauuuagaccuauuagaacaacaacaccaacuaauucaagaagcacuaaucuucgacaacaaacauaccaacuauaccauggaacauauacgcgucggaugggaacaacuauuaacaacaauugccagaacaauaaacgaaguagaaaaucaaauauugacuagagaugcaaaagggauuucacaagaacaaaugcaagaauuuagagccagcuuuaaccauuucgauaaagaucacggcggagcacuuggaccagaagaguuuaaagcaugccucauuucauuaggauaugacguagaaaaugaccgacaaggagaagcagaguucaauagaauuaugucuuuaguagauccaaaccauaguggccuaguaacuuuucaagccuucauagauuucaugaguagagaaaccaccgauacugacacagcugaccaaguaauagcaucauucaaaguauuagcuggagacaaaaauuuuauaacugcagaagaauuaagaagagaauuaccacccgaucaggcagaguacugcauagcaagaauggcaccauaucaaggaccagacgcaguaccaggagcauuagacuauaaaaguuuuuccaccgcauuguacggagagucagauuuauag

SEQ ID NO: 3538 - RNA, 597 nt, Artificial Sequence
  EAX10817 variant
auggcauuacaaggaauaaguguaauggaauuaaguggauuagcaccaggaccauuuugugcaaugguauuagcagauuucggagcaagaguaguaagaguagacaggccaggaaguagauaugauguaucaagauuaggaagaggaaaaagaagucuaguguuagauuuaaaacaaccacgaggagcagcaguauuaagaagacuauguaaaagaagugauguauuauuagaaccauuuagaagaggaguaauggaaaaauuacaauuaggaccagaaauauuacaaagagaaaauccaagauuaauauaugcaagauuaucaggauuuggacaaaguggaaguuuuugcagauuagcaggacaugacauaaauuauuuagcauuaucaggagggagaaauagcauauuuaaguucuuuaguguagaaaauagugaaauugaaagugugggaucaacaucaagaacagaacauguaggaugguggucaacauuuuuauacgaucuacaagacucaagauggggaauacauggauguuggaguaacagaacuccaguauuaagagcagcagaucaaagaacauggacaaaaguauaa

SEQ ID NO: 3539 - RNA, 597 nt, Artificial Sequence
  BAF85677 variant
auggcauuacaaggaauaaguguaguggaauugaguggauuagcaccaggaccauuuugugcaaugguacuagcagauuuuggagcaagaguaguaagaguggauagaccaggaagcagauaugauguaaguagauuagggagaggaaaaagaaguuuaguauuagauuuaaaacaaccaagaggagcagcaguauuaagaagauuauguaaaagaagcgauguauuacuagaaccauuuagaagaggaguaauggaaaaauuacaauuaggaccagaaauauuacaaagagaaaauccaagauuaauauaugcaagauuaaguggauuuggacaaaguggaaguuuuuguagacuagcaggacaugauauaaauuauuuagcacuaaguggaggaagaaauaguauauucaaauuuuucaguguagaaaauagugaaauagaaaguguaggaaguacaaguagaacagaacauguaggaugguggucaacauuuuuauaugauuuacaagauaguagauggggaauacauggauguuggaguaauagaacaccauuucuaagagcagcagaucaaagaacauggacaaaaguauaa

SEQ ID NO: 3540 - RNA, 2763 nt, Artificial Sequence
  EAX05380 variant
auggaaguacaauuaggacuuggaagaguuuauccuagaccaccuagcaaaaccuaccguggugcauuccaaaaccuuuuccaauccguucgagagguaauacaaaauccagguccaagacaucccgaagcagccagugcugcacccccuggagccucacuguuauuacuccaacaacaacagcaacaacaacaacaacaacaacaacaacaacaacaacaacaacaacaacaacaacaagaaacaaguccacgacaacaacaacaacaacaaggagaagauggcaguccacaggcacauagacguggaccuacuggauauuuaguacuagaugaagaacaacaaccuucccagccacaaucugcucuggaaugccauccugaaagaggauguguaccugaaccuggugcggcagucgcagccagcaaaggacuuccucagcaauuaccagcaccuccugacgaagaugacagcgcagcacccucaacacuaucucuuuuaggaccaacauuuccaggauuaucguccugcucagcugauuugaaagauauacuuagcgaagcaucuacaaugcaguuacuacaacaacaacaacaagaagcuguaucugaaggaucuucaucugggagagcaagagaggcaucaggagcgccaacaagcucuaaagauaauuauuuaggaggcacaucaacaauaucugauaaugcaaaagagcuauguaaagccguauccguauccaugggguuggguguagaagcacuagagcaucuaagcccaggagaacaauuaagaggugauuguauguacgcaccccuauuaggaguacccccugcaguuagaccgacaccaugugcaccauuagcagaauguaaagggagcuuauuagacgacucagcaggaaaaagcacggaagauacagcagaauacucuccguuuaaaggaggauauacaaaaggacuagaaggagaaaguuugggaugcagcggcagcgcagcggcaggaucaucaggcacucuugaacuaccuaguacauuaucauuauauaaaucuggagcauuagaugaagcugcagcauaucaaucucgagauuacuauaauuucccauuagcacuagccggucccccaccuccaccaccaccaccccauccacaugcaagaauaaaacuagagaauccauuagacuauggaagugcaugggccgcggcagcagcacaaugcagauauggagaccuugcaagccuacacggagcaggagcagcaggaccaggaucaggaucuccaucugccgcagcaaguucaagcuggcauacacuauucacugccgaagaaggucaacuauauggacccugcggagguggaggaggagguggaggcgggggagguggaggaggaggaggaggcgggggaggaggaggcggugaagcaggagcaguugcaccguauggguacacacgaccaccccaaggauuggcaggacaagaaucugacuucacagcaccagauguaugguauccaggagggaugguaucaagaguaccauauccuaguccuacaugcgucaaauccgaaaugggacccuggauggauucauauucaggaccuuauggugauaugcggcuugagacagcaagagaccacguauuaccaaucgauuacuauuuuccaccucagaaaacgugucuaauuugcggugaugaagcaucaggcugucauuauggagcacuaacuuguggauccuguaaagucuucuuuaaaagagcagcggaagguaaacaaaaguacuuaugcgcaucacgaaaugauuguaccaucgauaaauucaggaggaaaaacugcccaucuuguagacuaagaaaauguuaugaagcaggaaugacauuaggagcaaggaaauuaaagaaauuaggcaaccucaaacuucaagaagaaggagaagcgucauccacaacaucaccaacagaagaaacuacucaaaaacuaacaguaucccauauagaaggcuaugaaugccaaccuauauucuuaaacguauuagaagccauagaaccaggagucgugugugcuggacacgacaauaaccaaccagauucauuugcagcacuauuaucuucacucaacgaauugggagaaagacagcuaguacacguaguaaaaugggcaaaagccuugccaggauuccguaaucuacauguagacgaucaaauggccguaauacaauauagcuggaugggacucaugguauuugcuauggguuggagaaguuuuacaaacguuaauucaagaauguuauauuuugcacccgaucuaguguuuaaugaauacagaaugcauaaaucaagaauguauucacaauguguacgaaugagacaucuaucacaagaauuugguugguuacaaauaacaccucaagaguuccuauguaugaaggcuuuacuauuauuuucaauaauaccaguugauggacuuaaaaaccaaaaauucuuugaugaacuacgaaugaauuauauaaaagaauuagacagaauaauagcauguaaacguaaaaacccgacaucaugcucucgucgauuuuaucaacucacuaaauuauuagauucaguacaaccaauagcaagagaacuacaucaauuuacauuugacuugcuaaucaaaucucacaugguaucaguugauuuuccagaaaugauggcagaaauaaucucaguucagguacccaaaauacugaguggaaaaguuaaaccaaucuacuuccacacacaauaa

SEQ ID NO: 3541 - RNA, 1239 nt, Artificial Sequence
  AAH64630 variant
auggcaccaguagaacauguaguagcagacgcaggagcauuucucagacacgcagcauuacaagauauaggcaaaaacauauauaccauaagagaaguaguaacagaaauaagagacaaagcaaccagacgaagauuagcaguacuaccauacgaauuaagauuuaaagaaccacuaccagaauacgucagacucguaaccgaauuuucuaaaaaaacaggagauuauccaucacuauccgcaacagauauacaaguccuagcguuaacauaccaacuagaagcagaauucgugggaguuucacauuuaaaacaagaaccacaaaaaguaaaaguaucaaguucaauacaacauccagaaacuccauuacacauuucaggauuccaccuaccauacaaaccaaaaccaccacaagaaacagaaaaaggacauucugcaugugaaccagaaaaccuagaauucucaagcuuuauguucuggcgaaauccccuaccaaacauagaccacgaacuacaagaauuauuaauagacagaggagaagauguaccaucagaagaagaagaagaagaagaaaauggauucgaagauagaaaagacgauagcgaugacgauggaggaggauggauaacaccuaguaacauaaaacaaauacaacaagaauuagaacaaugcgacguaccagaagauguacgaguaggaugccucacaacagacuucgcuaugcaaaacguacuauuacaaaugggacuccacguacuagccguaaacggaauguuaauaagagaagcaagauccuacauacuucgaugccacggauguuuuaaaacaacaucugauauguccagaguauucugcucacacugcggaaacaaaacccuaaaaaaaguaagcguaacaguaucagacgauggaacauuacauaugcauuucucaagaaauccgaaaguacuaaacccaagaggccuaagauauucacuaccuacaccaaaaggaggaaaauaugcaauaaacccccaccuuacagaagaccaaagauuuccacaacuaagauuaucccagaaagcccgacaaaaaacaaacgucuucgcaccagauuauauagcaggaguuucacccuucguagaaaacgacauaucaucaagaagcgcaacacuacaaguacgagacuccacauuaggagccggacgaagaagacuaaacccaaacgcaucaagaaaaaaauucguaaaaaaaagguaa

SEQ ID NO: 3542 - RNA, 984 nt, Artificial Sequence
  AAH69102 variant
augcaaaugccagcaaugaugagucuuuuauuaguaucuguaggacuaauggaagcucuacaagcacaaucccauccaauaacaagaagagauuuauuuucucaagaaauucaauuagacauggcauuagccucauucgacgaccaauacgcaggaugugcagcagcaaugacagcagccuuaccagaucuaaaucauacagaauuccaagcaaaccaaguauaugcagauucauggacccuugcaucaagccaauggcaagaaagacaagcaagauggccagaauggucacuaucaccaacacgaccaucaccaccaccuuuaggauucagagacgaacacggaguagcauuauuagcauauaccgcaaacucaccauuacauaaagaauuuaaugcagccguaagagaagcaggaagaucaagagcucacuaucuacaucacuuuucauuuaaaacacuacauuuccuacuaacagaagcauuacaauuacuaggaucaggacaaagaccaccaagaugccaccaaguauuuagaggaguacauggauuaagauucagacccgcaggaccaagagcuacaguaagauuaggaggauucgcuagcgcaagucuaaaacaugucgccgcacaacaauuuggagaagacacauuuuuuggaauauggacaugucuaggagccccaaucaaaggauacucuuuuuuucccggagaagaagaaguauuaauaccaccauucgaaacauuucaaguaauaaaugcaucuagacuagcacaaggaccagcaagaaucuauuuaagagcacuaggaaaacacucaacauauaacugugaauacauaaaagacaaaaaauguaaaucaggaccaugccaucuugauaacuccgcaaugggacaaucaccacuaucagcaguauggucauuauuauuacuacuaugguuuuuaguaguacgagcauucccagacggaccaggacuauuauaa

SEQ ID NO: 3543 - RNA, 1035 nt, Artificial Sequence
  AAH09751 variant
auggcccaaaaagaaaauagcuauccuuggccauauggaagacaaacagcaccaucaggcuuaucaacauuaccacaaagaguauuaagaaaagaaccaguuacuccaucagcauuaguccuaaugucaagaucaaauguacaaccaacagcagcaccaggacaaaaaguaauggaaaacucaucaggcacuccagacaucuuaacaagacacuuuacaauagacgacuucgaaaucggaagaccauuaggaaaaggaaaauuuggaaauguauaucuagcaagagaaaaaaaaucacauuucauaguagcacuaaaaguacuauucaaaagccaaauagaaaaagaaggaguagaacaccaacuaagaagagaaauagaaauacaagcacauuuacaccauccaaacauccuacgacuauacaauuacuucuacgaccgaagaagaauauaccuaauacuagaauacgcaccaagaggagaacuauacaaagaauuacaaaaaucauguacauucgacgaacaaagaacagcaacaauuauggaagaacuagcagacgcccuaauguacugucacgguaaaaaaguaauacauagagauauuaaaccagaaaaccuauuauugggacuaaaaggagaacuaaaaaucgccgauuucggauggucaguucacgcaccauccuuaagacgaaaaacaaugugcggaacacuagacuacuuaccaccagaaaugauagaaggaagaaugcacaacgaaaaaguagaccuauggugcaucggaguacuaugcuacgaacuucuaguaggaaacccaccauucgaaagugcuucacauaacgaaacauacagaagaauaguaaaaguugacuuaaaauuuccagcaucagucccuaugggagcucaagauuuaauaucaaaacuauuaagacauaacccaucagaaagauuaccccuagcacaaguaucagcacacccaugggucagagcuaacucaagaagaguacuaccaccauccgcacuacaaucaguagcauaa

SEQ ID NO: 3544 - RNA, 360 nt, Artificial Sequence
  AAD48083 variant
augucaagaucaguagcacuagcaguacuagcacuacuaucacuaucaggacuagaagcaauacaaagaaccccaaaaauacaaguauacucaagacacccagcagaaaacggaaaaucaaacuuccuaaacugcuacguaucaggauuccacccaucagacauagaaguagaccuauuaaaaaacggagaaagaauagaaaaaguagaacacucagaccuaucauucucaaaagacuggucauucuaccuacuauacuacacagaauucacaccaacagaaaaagacgaauacgcaugcagaguaaaccacguaacacuaucacaaccaaaaauaguaaaaugggacagagacauguaa

SEQ ID NO: 3545 - RNA, 1137 nt, Artificial Sequence
  AAH28058 variant
augagaaugcuaguaucaggacgaagaguaaaaaaauggcaauuaaucauccaacuuuucgcaacuugcuuccuagcaucacuaauguucuucugggaacccaucgacaaccauaucguaucacauaugaaaucuuacucauaccgauaccuaauaaacucauaugacuucguaaaugacacacuaucucuaaaacacacaucagcaggaccaagauaccaauaccuaauaaaucacaaagaaaaaugucaagcacaagacguauuacuauuauuauucgucaaaaccgcaccagaaaacuacgacagaagaucaggaauaagaagaacauggggaaacgaaaacuacguaagaucacaacuaaacgcaaauauaaaaacacuauucgcauuaggaacaccaaacccauuagaaggagaagaacuacaacgcaaacuagcaugggaagaucaaagauacaaugacauaauccaacaagacuucguagauaguuucuacaaccuaacauuaaaacuacuuaugcaauucucaugggcaaacacauacugcccacacgcaaaauuuuuaaugacagcagacgacgauauauuuauacacaugccaaaccuaauagaauaccuacaauccuuagaacaaauaggaguacaagacuucuggauaggaagaguacacagaggagcaccccccauacgagacaaaucaucaaaauacuacguaucauaugaaauguaccaauggccagcauauccagacuacacagcaggagcagccuacguaauaucaggagacguugcagcaaaaguauacgaagcaucacaaaccuuaaacucaucacuauacauagacgacgucuucaugggauuaugugcaaacaaaauaggaauaguaccacaagaccaugucuucuucucaggagaagguaaaacacccuaucacccaugcauauacgaaaaaaugaugacaucccacggacaucuagaagaccuacaagaucuauggaaaaaugcuacagauccaaaaguaaaaacaauaucaaaaggauucuucggacaaauauacugcagacuaaugaaaauaauauuacucuguaaaauauccuacguagacacauaccccuguagagcagcauucaucuaa

SEQ ID NO: 3546 - RNA, 1602 nt, Artificial Sequence
  AAA35516 variant
auguggcuagguagacgagcauuaugugcauuaguucuucucuuagcaugugcaucacuuggauuauuauaugcaaguacaagagaugcaccaggacuuagauuaccacuugccccuugggcaccuccccaaucaccaagaagaccagaacuaccugauuuggcaccugaaccaagguaugcucacaucccuguuagaauaaaagagcaagucguuggauuguuagcauggaauaauuguagcugcgaaucaucagguggcggauuacccuuaccauuucaaaaacaaguaagagcaauagauuuaacaaaagccuuugacccagcugaauuaagagcagcaucagccaccagagaacaagaauuucaagcauuucuaucacgcucccaaucuccugcagaccaauuacuaauagcaccagcaaacucuccccuacaauauccuuuacaaggcguagaaguccaaccacuuagaaguauauuaguuccaggacuaaguuuacaggccgcaaguggccaagaaguauaccagguaaauuuaacggccucauuaggaaccugggauguagcuggcgaaguaacagguguuacguuaacaggagaaggacaagcggauuuaacucuaguaaguccaggauuggaccaacuuaaucgacaauuacaauuaguuacauacucaucaagaucauaucaaacaaacacagcagauacaguaagguuuucaacagaaggacaugaagcagcauuuacuauaagaauuagacacccuccaaauccaagauuauauccaccaggcucacuaccccaaggugcacaauauaacauaagugcuuuaguaacaauagccacaaaaaccuuucuacguuaugauagauuaagagcauuaauuacaucaauuagaagauuuuauccuaccguaacaguuguaauagcagacgauucagauaaaccagaaaggguaucaggaccuuauguggaacacuauuuaaugccuuuuggaaaaggaugguuugcaggacgaaauuuagcaguaagucaaguaacgacaaaauauguacuauggguagaugaugauuuuguauuuaccgcaagaaccagacucgaaagauuaguagauguacuagaaagaacaccuuuagacuuagucggaggugcaguaagagaaaucucaggauuugcaacaacuuauagacaauuacuauccguagaaccaggcgcaccaggacuaggaaauugccuuagacaaagaagaggcuuucaucacgaauuaguagguuuuccaggauguguagugacagaugggguuguaaauuucuuucuugcaagaacugacaaaguacgugaaguaggauuugacccaagacuaucuaggguagcgcacuuagaauuuuuccuugauggauuaggaaguuuaagaguagguucguguagugauguaguuguagaucaugcuuccaaauuaaaauuaccguggacaucaagagaugccggagcagaaacauacgcaagauauagauacccaggaaguuuagaugaaucacaaauggccaaacaccgauuacuauucuuuaaacauagauuacaaugcaugacgucacaauaa

SEQ ID NO: 3547 - RNA, 849 nt, Artificial Sequence
  AAH74729 variant
auggcaagccuaggccaaauauuauuuuggucaauaauaaguauaauaauaauacuagcaggagcaauagcacuaauaauaggcuucggaauuucagguagacacagcauaacaguaacaacaguagcaagugcaggaaacauaggagaagacggaauacuaucauguacauuugaaccagacauaaaauuaagcgacauaguaauacaauggcuaaaagaaggaguacuaggauuaguucacgaauuuaaagaaggaaaagaugaauuaagcgaacaagacgaaauguucagagguagaacagcaguauucgcagaucaaguaauaguaggaaacgccagucuaagacucaaaaacguacaacuaacagaugcaggaacauauaaauguuacauaauaacaagcaaaggaaaaggaaaugccaaccuagaauacaaaacaggagccuucagcaugccagaaguaaacguagacuacaaugcaucaagcgaaacauuacgaugugaagccccaaggugguuuccacaaccaacaguaguaugggcaagccaaguagaccaaggagcaaauuucucagaaguaaguaauacaucauucgaacuaaauagugaaaacguaacaaugaaaguaguaaguguauuauacaauguaacaauaaauaacacauacucaugcaugauagaaaaugauauagcaaaagcaacaggagauauaaaaguaacagaaucagaaauaaaaagaagaucacauuuacaacuacuaaacaguaaagcaucauuaugcguaagcagcuucuuugcaauaaguugggcacuauuaccucuaucaccauaucuaaugcuaaaauaa

SEQ ID NO: 3548 - RNA, 132 nt, Artificial Sequence
  AAC50123 variant
auggcagcaagagcaguauuucuagcacuaucagcacaacuauuacaagcaagauuaaugaaagaagaaagcccaguaguaagcuggagacuagaaccagaagauggaacagcauuaugcuuuauauuuuaa

SEQ ID NO: 3549 - RNA, 1158 nt, Artificial Sequence
  AAN40694 variant
auggcagcagcguuauuuguauuauuaggauucgcauuauuaggaacacauggagcuucaggugcagcaggguuuguacaagcuccguuaagccaacaaagauggguaggaggaagcgucgaauuacauugugaagcaguaggaaguccaguaccagaaauacaauggugguuugaaggacaaggaccaaacgauaccuguucacaauuaugggauggagcaagacuagauagaguacauauacacgcaacauaucaucaacacgcagcaaguacaauaaguauagauacauuaguugaagaagauacagguacuuaugaaugccgagcaaguaaugauccagacagaaaucauuuaacaagagcaccaagaguaaaauggguacgagcacaagcaguaguacuuguccuagaaccaggaacgguauuuacaacaguagaagaccuaggaagcaaaauuuuauuaacauguucacuaaaugacucagcaacagaaguaacaggacauagaugguuaaaaggagguguaguauuaaaagaagaugcauuaccaggacagaaaacugaauuuaaaguagauagcgaugaucaauggggugaauauucauguguauuuuuaccagaaccaaugggcacagcaaacauucaauuacacggaccaccacguguaaaagcagugaaaucaagcgaacauauaaaugaaggagaaacagcaaugcuaguauguaaaucagaaucaguaccaccaguaacagauugggcaugguacaaaauuaccgauucagaagacaaagcacuuaugaauggaagugaaucacgauucuuuguaaguucaucacaaggaagaucagaauuacauauagaaaauuuaaacauggaagcagauccaggacaauauagauguaauggaacuucaaguaaagggagcgaucaagcaauaauaacucugcgaguaagaucacauuuagcagcauuauggccauuuuuaggaauaguagcagaaguucuaguauuaguaacuauaauauuuauuuaugaaaaacgaagaaaaccagaagauguucuagaugaugaugaugcaggaucagcaccauuaaaaaguagcggacaacaccaaaacgauaaaggcaaaaauguaagacaaagaaacucaucauaa

SEQ ID NO: 3550 - RNA, 720 nt, Artificial Sequence
  ABX60202 variant
auggcacacgcaggaagaacaggauaugauaauagagaaauaguaaugaaauauauacauuauaaauuaucacaaagaggauaugaaugggaugcaggagauguaggcgcagcaccaccaggagcagcaccagccccaggaauauuuaguucacaaccaggucauacaccacauccagcagcaaguagagauccaguagcaagaacaaguccauuacaaacaccagcagcaccuggagcugcagcaggaccagcauuaaguccaguaccaccaguaguacauuuaacauuaagacaagcuggagaugauuuuucacgaagauauaggagagacuuugcagaaaugaguucacaauuacauuuaacaccauuuacagcaagaggaagauuugcaacaguagucgaagaauuauuuagagauggaguaaacuggggaagaauaguagcauuuuuugaauuuggaggaguaaugugcguagaaucaguuaauagagaaaugucaccauuaguagauaacauagcauuauggaugacagaauaucuaaauagacauuuacauacauggauacaagauaauggaggaugggaugcauuuguagaauuauauggaccaucaaugagaccauuauuugauuuuagcugguuaagucuaaaaacguuacuaucacuagcauuaguaggagcauguauaacauuaggcgcuuauuuaucacauaaauaa

SEQ ID NO: 3551 - RNA, 1290 nt, Artificial Sequence
  ABX82700 variant
auggucgacccuguaggauuugcggaagcauggaaagcacaauuuccagacagugaaccaccaagaauggaauuaagaaguguaggugauauagaacaagaauuagaaagguguaaagccagcauaagacgauuagaacaagaaguaaaucaagaaagauucagaaugauuuaucuccaaacacuauuagcaaaagaaaaaaaaagcuacgauagacaaagauggggauuuagaagagccgcacaagcaccugauggagcaagugaaccaagagcaucugcaucacgaccacaaccagccccagcagacggagcagauccuccuccggccgaagaaccagaagcgagaccagacggugaagggucaccuggaaaagcuaggccagguacagcaagacgaccaggagcagcagcaucaggagaaagggaugauagggguccaccagcaucaguugcagcacuccgaaguaacuuugaaagaauucguaaaggacauggacaaccaggagcagaugcagagaaaccauuuuacguaaauguagaauuucaucaugaaagaggacuuguaaaaguuaaugauaaagaaguuagugauagaauaucaagcuuagguucgcaagcaaugcaaauggaaagaaaaaaaagucaacauggagcaggaaguucaguaggagaugccucacgacccccuuacagagguaggucaagcgaaaguucauguggaguagauggagauuaugaagaugcagaauugaauccaagauuuuuaaaagauaauuuaauagacgcaaacggaggaaguagaccaccauggccaccacuagaauaucaaccauaucaaucaauauauguaggaggaaugauggaaggagaagguaaagguccacugcucagaucacaaaguacaucagaacaggaaaaaagauuaacauggccuagacgaucauacagcccaagaaguuuugaagauuguggagguggauacacuccagauugcaguaguaaugaaaaucuaacaaguucagaagaagauuuuagcucaggacaaaguucacgaguaaguccaaguccaaccacguauaggauguucagagauaaaucaagaaguccaucacaaaauagucaacaaucauuugacaguucaucaccgccaacaccacaaugccacaaaagacacagacauuguccagucguaguaagugaggcuacaauaguaggaguaaggaaaacaggacaaauauggccgaaugauggagaaggagcauuccauggagacgcagauggaggguaa

SEQ ID NO: 3552 - RNA, 1665 nt, Artificial Sequence
  ABX82703 variant
augguagauccaguaggauuugcugaagcauggaaagcucaauuuccagauagcgaaccuccaagaauggaauuacgaucuguaggagacauagaacaagaauuagaaagauguaaagcaucaaucagaagauuagaacaagaaguaaaccaagaaagauuuagaaugauauaucuccaaacauuacuagcaaaagaaaagaaaaguuacgacaggcaaagauggggauuuagacgagcagcacaagcaccagauggagcaagugaaccuagagcaagcgccucaagaccucaacccgcacccgcagauggagcagacccaccgccagcugaagaacccgaagcaagaccagauggagaaggaaguccaggcaaagcaagaccaggaacagcaagaagaccaggagcagcagcaucaggagaaagagaugauagaggaccuccagccagcguggcagcucuaagaucaaauuuugaacgcauaaggaaggggcauggacaaccaggagcagacgcagaaaaacccuuuuacguuaauguagaauuucaccacgagagaggauuaguaaaagucaaugauaaagaagucucugacagaauaagcaguuuaggaucacaagcaaugcaaauggaaaggaagaaaagccaacauggagcagggucuucuguaggcgacgcaucaagaccaccguaccgaggccgaagcucggaaaguagcuguggaguagacggagacuaugaagaugcagaauuaaacccaagauuuuuaaaagauaauuuaauugaugcuaacggaggaucaagaccacccuggccuccauuagaguaucaacccuaucaaucaaucuauguaggagguaugauggaaggugaaggaaaaggaccccuauuaagaagccaaucaaccagugaacaagagaaaagauuaacauggccacgaagaagcuauaguccuaggagcuucgaagauugugguggaggauacacaccagacugcucaagcaaugaaaauuuaacuucaucagaagaagauuucagcucaggacaaucaucacgaguaaguccaaguccaacaacauacagaauguuucgcgauaaaucuagaucuccuagucaaaauucccaacaaaguuuugacagcucaucgccaccaacaccacaaugccauaaaagacaucgacauuguccaguaguaguauccgaagcaacuauaguuggcguucgaaaaacaggacaaauauggccaaaugauggagaaggugcauuucacggagaugcugauggaaguuuuggaacaccaccaggauauggaugugcagcagauagagcagaagaacaaagaagacaucaagauggguuaccuuauauagaugauucaccaagcaguucaccacaucuuucaucuaaaggucgagguucucgcgaugcuuuaguuagcggagcacuugaaucaacgaaagcaucagaauuggauuuagaaaaaggcuuagaaaugagaaaauggguacuaucaggaauauuagcuucagaagaaacauaucuaucucauuuagaagcacuauuacuaccuaugaaaccauuaaaagcagcagcaacaacaagucaaccaguacucaccucacaacaaauagaaacaauauucuuuaaaguuccagauuuauuauaa

SEQ ID NO: 3553 - RNA, 1545 nt, Artificial Sequence
  ABX82704 variant
augguagauccaguaggauucgcugaagccuggaaagcacaauuuccagauagugaaccuccaagaauggaauuaagaagcguaggggauauagaacaagaacuagaaagauguaaagccagcauacgacgauuagaacaagaaguaaaucaagaaagauucagaaugauauauuuacaaacauuacuagcuaaagaaaagaaaaguuacgauagacaaagauggggauuucgacgagcagcacaagcaccagauggagcaagugaaccccgagcaucugcgucaagaccccaaccagcuccugcagauggagcagauccaccacccgcagaagaaccggaagcacgacccgacggugaaggaagucccgguaaagcaagaccagguacagcaagaagaccgggagcugcggcaucaggagaaagagacgaucgaggaccuccagcuuccguagcagcauuaagaucaaauuuugaacgaaucagaaaagggcauggacaaccaggagcagaugccgaaaaaccauuuuacgugaacguagaguuccaucaugaaagagggcuugucaaaguaaaugauaaagaaguaucagacagaauaagcagucuagguucacaagcaaugcaaauggaaagaaagaaaucacaacauggugcaggaucaucaguuggugaugcaucaagaccaccauauagagguaggucaagcgaaucuagcugcggaguagauggagauuacgaagaugcagaauuaaauccacgauuccuaaaagauaauuuaauagaugcaaauggaggauccagaccaccuuggccaccauuagaauaucaaccauaucaaucaauauaugugggaggaaugauggaaggagaaggaaaaggaccauuacuaagaagucaaagcacaucagaacaagagaaaagguuaacauggccaagaagaucauauucacccagaaguuucgaagauugcgguggaggauacacaccugauuguuccaguaaugaaaauuuaacaaguucugaagaagauuuuaguucaggacagagcucaagaguaagcccaucacccacaacuuauagaauguucagagauaaaagcagaucuccuucucaaaauagccagcaaucauucgacagcaguaguccuccaacaccucaaugucauaaaagacauagacauuguccaguaguagucucagaagcuacaauaguaggaguaagaaaaacaggacaaauauggccaaaugauggggaaggagcauuucauggcgacgcagauggcucauuuggaacuccaccaggauaugguugugcggcagauagagcagaagaacaaagaaggcaucaagauggcuuaccauacauagaugauaguccaucuaguucaccucaucuuagcagcaaaggaagaggaucaagagacgccuuaguaucaggagcacuagaaaguacaaaagcaagugaacuagaccuugaaaaaggacuagaaaugagaaaaugggucuuaucagguauauuagcuucagaagaaauaacacuauaa

SEQ ID NO: 3554 - RNA, 1326 nt, Artificial Sequence
  ABX82705 variant
augguagacccuguaggauuugcagaagcauggaaagcacaauuuccagacucagaaccaccacgaauggaauuaagaucaguaggagauauugaacaagaacuagaaagaugcaaagcaucaauaagaagauuagaacaagaaguaaaucaagaaagauucagaaugauauaucuacaaacauuacuagcgaaagaaaagaaaaguuacgauagacagagguggggauucagacgagcagcacaagcaccagauggugcuagugaaccuagagcauccgcaucaagaccacaaccagccccugcugauggagcagauccaccgccagcagaagaaccagaagcgagaccggacggagaggguaguccaggaaaagcaagaccaggaacagcacgaagaccaggagcugcagcaucaggagaaagagaugacagaggaccgccagcaagcguagcagcuuuaagaucaaauuuugaaagaauaagaaaaggacauggacaaccaggagcagacgcagaaaaaccauucuacguaaauguagaauuucaucaugaaagagguuuaguaaaaguaaaugacaaagaaguaucagauagaauuaguagcuuggggagccaagcaaugcaaauggagagaaagaaaagucaacauggagcaggaucaaguguuggagaugcaagcagaccaccuuauagaggaagaaguagcgaaagcucauguggaguagauggagauuaugaagaugcagaauuaaauccaagauuuuuaaaagauaaucugauagacgcaaauggaggaucuaggccaccuuggccaccauuagaauaucaaccauaucaaaguauuuauguuggaggaaugauggaaggagaagggaaaggaccauuacuaagaagccaaucaacuucagaacaagaaaaacgucuaacauggccaagaagaaguuauagcccgagaaguuuugaagauugcggaggcgguuauacaccagacugcaguaguaaugaaaaccuaacaaguucugaagaagauuuuaguucagggcaaucaucaagaguuagcccgaguccaacuacauaucgaauguuuagagauaaaaguagaaguccaagccaaaauagucaacagaguuuugauagcucaaguccaccaacaccacaaugucauaaacgucacagacacuguccaguagucguaagugaagcaacaauuguaggaguaagaaaaacaggucaaauauggccaaacgauggagaaggagcauuucacggagaugcugauggaaguuuagaacuacaaggaaaaccaucaagauggacacaauaa

SEQ ID NO: 3555 - RNA, 1575 nt, Artificial Sequence
  ABX82706 variant
augguagauccaguaggauuugcugaagcuuggaaagcucaauuuccagauagcgaaccaccacgaauggaacuacgaucaguaggagauauugaacaagaauuagaaagguguaaagcaucaauaagaagauuagaacaagaaguaaaucaagaaagauucagaaugauuuacuuacaaacgcuacuagcaaaagaaaaaaaaaguuaugauagacaaagauggggauuuagaagagcagcgcaagcaccagauggagcaagugaaccaagagcgagugcaucaagaccacaaccagcaccagcagacggagcagauccaccaccugcugaagagcccgaagcucgaccagacggagaagggaguccaggaaaagcacgaccaggaacagcaagaaggccaggagcagcagcuucaggagaaagagaugauagagggccaccagcaucaguagcagcuuuaagaaguaauuucgaaagaauaagaaaaggacauggacaaccgggugcagacgcagaaaaaccuuuuuauguaaauguugaauuucaccaugaacgagggcucguaaaaguaaaugacaaagaaguaagugaccguauaaguaguuuaggaagucaagcaaugcaaauggagagaaaaaaaagucaacauggugcugguucaucuguaggagacgcaaguagaccaccauaucgaggaagaucaucagaaaguagcuguggagucgauggagauuacgaggacgcggaauuaaauccaagauuucuaaaagacaaucuaauugaugcaaaugggggaucaagaccaccauggccaccacuugaauaucaaccuuaucaaucaauuuacguaggaggaaugauggaaggugaaggaaaaggaccauuauuaagaagucaaaguacaucagaacaagaaaaaagauugaccuggccgagaagaagcuauucaccaagaagcuuugaagacugcggaggagguuauacaccagauugcucgucaaaugaaaauuuaacaucaagugaagaagacuucagcaguggccaaagcagcaggguuaguccaaguccaacaacuuauaggauguuuagagacaaaaguagaucaccaucacagaacagccaacaaaguuucgacucaaguucucccccaacaccucaaugucacaaaagacaccgacacuguccaguaguuguaagcgaagcaacaauagucgguguaagaaaaacaggacaaauauggccaaaugauggugaaggagcauuucacggagaugcagauggaucauucggaacaccacccggauauggaugugcggcugauagagcagaggagcaaaggagacaucaagauggauugccguacauagacgauucaccaagcaguaguccacaucuaagcucuaaaggacgagguagcagagaugcacuaguaucuggugcuuuagaaaguacaaaagcaagugaauuagacuuagaaaaaggacuagaaaugagaaaaugggauccaguaaaaaugacacccacauucagccuacauugcaugauauuauggccgguagaaauaacacuauaa

SEQ ID NO: 3556 - RNA, 1398 nt, Artificial Sequence
  ABX82707 variant
augguagauccaguuggauuugcagaagcuuggaaagcacaauucccagauagcgaaccgccuagaauggaauuaagaucaguaggagauauugaacaagaauuagaaagaugcaaagcuagcauuagacgacuagaacaggaagucaaucaagagagauucagaaugauuuauuuacaaacauuacuagcaaaagaaaaaaaaagcuaugauagacaaagauggggauuucgacgggcagcacaagcaccagauggagcaucugaaccaagagcaagugccucaagaccucaaccugcaccagcagauggagcugauccaccuccagcagaagaaccagaagcaagaccugauggagaaggcaguccaggaaaagcaagaccaggaacagcaagaagaccaggugcagcagcaucaggagaaagagaugauagagguccaccagccaguguugcagcacucagaagcaauuucgaaagaauaagaaaaggccauggacaaccaggugcagacgcagaaaaaccauuuuauguaaauguagaauuucaucaugaaagaggacuaguaaaaguaaacgauaaagaaguaucagaccgaauaaguaguuuaggaucacaggcaaugcaaauggaaagaaaaaaaucacaacauggagcagguucgagcgucggagaugcaucaagaccuccauauagaggucgaucaagcgaaucaaguugcgguguagauggugacuacgaagacgcagaguuaaauccaagauuucuaaaagauaauuuaauagacgcuaauggcggcucgagaccaccguggccaccacuugaauaucaaccauaucagaguauuuaugucgguggaaugauggaaggagaaggaaaaggaccucuacuaagaucacaaucaaccagugaacaagaaaaaagauuaacauggccaaggagaaguuacaguccaagaucauuugaagacugcggaggaggauauacuccagacugcaguaguaacgaaaacuuaacuucaagcgaagaagauuuuucaucgggacaaagcucaagaguaagucccaguccaacaacauauagaauguuuagagacaaaaguagaaguccuucacaaaacagucaacaaucauucgacucaucaucaccaccaacaccacaaugucauaaaagacacagacauugucccguaguaguaucagaagcaacaauaguuggaguaagaaaaacuggacaaauauggccaaaugacggcgaaggagcauuucauggagaacauccuggugcagcagaagaaguauuccaaaaauuacuaccagacauaagaggagcagcagaugccgaucaacuuguaugugaaacaccagauuguccacaacacucagcagaccaccaauaa

SEQ ID NO: 3557 - RNA, 1377 nt, Artificial Sequence
  ABX82709 variant
auggucgauccaguuggauuugcagaagcuuggaaagcucaauuucccgacagugaaccaccaagaauggaauuaaggaguguuggagacauagaacaggaauuagaaagauguaaagcaucaauaagacgauuagaacaagaaguaaaucaagaaagauuuagaaugauauacuuacaaacauugcuggcuaaagaaaaaaaaaguuaugacagacaacgaugggguuuuaggagagcagcucaagcaccagauggagcgagcgaaccaagggcaagcgcaucaagaccacaaccagcaccggcagauggagcugacccaccuccagcagaagaaccagaagcaagaccagacggggaagguagcccgggaaaagcaaggccaggaacagcaagaaggccaggagccgccgcaucaggugaaagagaugauagaggaccaccagcaucaguagcagcauuaagaagcaauuuugaaagaauuagaaaaggacauggacaaccuggagcugaugcagaaaaaccauuuuauguaaauguugaauuucaucaugaacgaggacuaguaaaaguaaacgauaaagaaguaucugacagaauuucaaguuuaggaagucaagcaaugcaaauggaaagaaaaaaaagccaacauggagcaggaucaagcguaggagaugcaaguagacccccauauaggggaagaucaagugaaaguucaugcggagucgauggagauuacgaagaugcagaauuaaauccaagauuuuuaaaagauaauuuaauagaugcaaacggaggaagcagaccaccguggccgccauuagaauaucaaccauaucaaucaauauacguaggaggaaugauggaaggugaagguaaaggaccacuauuaagaucucaaucaacaucagaacaagaaaaaagacuaacauggccaaggagaucauauagcccucgaucauuugaagacuguggaggaggauacacuccugauugcuccaguaaugaaaacuuaacaaguagugaagaagauuuuucuaguggacaaucaucaagaguuaguccaucaccaaccacauauagaauguucagagauaaaucacgaucaccaagucaaaacagucaacaaucauuugauagcucaucaccaccaacaccccaaugccauaaaagacauagacacuguccaguaguaguaucagaagccacaauaguaggaguacgaaaaacaggacaaauauggccgaaugauggugaaggagcauuucauggagaugcagacggaaguuucgggacaccucccggauauuguuguuuauguuuaccggcauggccaucaggauguacagcagcaaccgcaagaguaaccaggaguuaa

SEQ ID NO: 3558 - RNA, 1365 nt, Artificial Sequence
  ABX82710 variant
augguugauccaguagguuuugcagaagcuuggaaagcacaauuuccggacagcgagccuccaagaauggaauuacggucuguaggggauauugaacaagaacuagaaagaugcaaagcuucaauaaggagauuagagcaagaaguaaaucaagaacgauucagaaugauuuaucugcaaacgcuauuagcaaaagaaaaaaaaaguuacgaccgacaaagaugggguuuucguagagccgcacaagcaccugauggggcaagugaaccaagagcaucagcaucaagaccacaaccagcaccagcagauggagcagauccaccgccagcagaagaaccagaagcaagaccagauggagaaggaucaccgggcaaggcaagaccagguacagcaagaagaccaggagcagcugcaaguggcgaaagagaugaucgaggaccaccugcaaguguagcagcacuacgaucaaauuuugaacgaauaagaaaaggacauggacaaccgggagcagaugcagaaaaaccuuuuuauguaaauguagaauuucaucaugaaagaggacuaguaaaaguaaaugauaaagaaguaagugauagaauaaguaguuuaggaagccaagcaaugcaaauggaaagaaaaaaaagucaacacggagccggaagcucaguaggagacgcaucaagaccaccauauagaggaagaaguagcgaaaguaguugcggaguagauggggacuaugaagaugcggaauuaaauccucguuuuuugaaagauaacuuaauagaugcaaaugggggaaguagaccgccguggccaccucuugaauaucaaccauaccaaucaauauacgucggagguaugauggaaggagaaggaaaaggaccucuucuuagaucacaaucaacaagcgaacaagaaaaaagauuaacauggccacguagaucauauucaccaaggagcuuugaagauuguggaggaggauacaccccagacuguaguaguaaugaaaaccuaacuaguucagaagaagauuuuucaaguggacaaaguucuaggguuucaccaaguccuacaacauauagaauguuuagagacaaaaguagaucgccaucucaaaauucacaacaaaguuuugacagcaguagcccuccaacaccacaaugucauaaaagacacaggcacugucccgugguaguaagugaagcaacgauuguaggaguuagaaaaacuggacaaauauggccaaaugauggagaaggagcauuccacggagaugcagaugguucuuucggaacaccaccaggcuaugguugugcagcaggaagaccaccacauuuaacagaauugccaguucaacaucaauag

SEQ ID NO: 3559 - RNA, 1404 nt, Artificial Sequence
  ABX82711 variant
augguggacccaguaggauuugcagaagcauggaaagcacaauucccagauucagaaccgccaagaauggaauugagaucuguaggagauauagaacaagagcucgaaagauguaaagcgucaauaagaagauuagaacaagaaguaaaucaagaaagguucagaaugauauaccuucaaacauuacuagcaaaagaaaaaaagucauaugauagacaaagauggggauuuagaagagcagcacaagcaccagauggagcaucagaaccaagagcgagugccucuagaccacaaccagcacccgcagacggagcagauccaccaccagcugaagaaccagaagcaagaccagacggagaaggaucaccgggaaaagcccgaccaggaaccgcaagaagaccuggagcagcagccucaggagaacgagaugaccgugguccuccagcaucaguagcagcucuacgaucaaacuuugaaagaauaagaaaaggacauggccagccaggagcagaugcagaaaaaccauucuacguaaauguagaguuccaccaugaaagaggucuaguaaaaguaaaugauaaagaaguaagugauagaauaaguucauuaggaucacaagcaaugcaaauggaaagaaaaaaaagucaacauggagcaggaucaaguguaggagaugccucuagaccuccauauagaggaagaucuagugaaucgucuuguggaguagauggagacuaugaagaugcagaacuaaauccaagauuuuuaaaagauaauuuaauagaugcaaauggcggaaguagaccgccauggccacccuuagaauaccaaccauaccagagcauauacguaggagggaugauggaaggagaaggaaaaggaccacuacuaagaucacaaaguacuucagaacaagaaaaaagauuaacauggccaagaagaagcuacaguccaagaaguuuugaagauuguggagggggcuauacacccgauuguucaucaaaugaaaauuuaacaaguagcgaagaagauuuuucaagcggacaaucaagcaggguaagucccucaccaacaacauauagaauguucagagauaaaucaaggaguccaucccaaaauucacaacaaucauuugauucaaguagcccgccaacaccacaaugucauaaaagacaucgacauugcccaguagucguuagugaagcaacaauaguaggaguaagaaaaaccggucaaauauggccaaaugauggagaaggagcauuccauggagacgcaguauuaaaaacagaaguaccucaucaaggaguaagaagagcaagacuaaguuuagaagcuuuaggcgaagauccaucauuucuuuuuccagcaucugauggaccaagacauaguagcacaugguaa

SEQ ID NO: 3560 - RNA, 1542 nt, Artificial Sequence
  ABX82712 variant
augguagauccaguaggauucgcagaagcuuggaaagcacaauuuccagauagugaacccccacguauggaacuaagaaguguaggagauauagaacaggaauuagaaagauguaaggcaaguauuaggagauuagaacaagagguaaaccaagaaagauucagaaugauauauuuacaaacacuauuagcaaaagaaaaaaaaaguuaugauagacaaagauggggauuuagaagagcagcacaagccccugauggagcaagugaaccaagagcaucagcaucaagaccacaaccagcaccagcagacggagcagacccaccaccagcagaagaaccagaagcaagaccagacggagaagguucaccugggaaagcuagaccagggacugcacgaagaccuggagcagcagcaucaggagaacgagaugaucggggcccgccagcaucaguagcagcauuaaggagcaauuuugaaagaauaagaaaaggacauggucagccaggagcagaugcagaaaaaccauuuuauguaaaugucgaauuucaucacgaaagaggucuaguaaaaguaaaugauaaagaaguaagcgacagaauaucaucacuagggagccaggcaaugcaaauggaaagaaaaaaaucacaacauggugcuggcucaagcguaggagacgcaucaagaccgccauauagaggaagaucaucagaaaguucauguggugucgauggagacuaugaagacgcagaauuaaauccaagguuucucaaagauaauuuaauagaugcaaauggaggcucuaggccaccuuggccaccauuagaauaucaaccauaucaaucaaucuauguaggaggaaugauggaaggugagggaaaaggaccauuauuacguucucaaucaacuucagaacaagaaaaaagacuaacauggccaagacgaucauacucaccaagaaguuucgaagacuguggggggggauauacaccagauuguucaucaaaugaaaauuuaacaucaagugaagaagauuuuaguucaggacaaucuagucguguaaguccaaguccaacuacauacagaauguuuagagacaaaucaagaucaccaucucaaaauagccaacaaucauucgacagcucaagcccaccaacaccacaaugccauaaacgacaucgacauuguccaguuguaguaucggaggcaacgauagucggaguaagaaaaacaggacaaauauggccaaaugauggagaaggagcuuuccacggagaugcagacgguucauucggaacuccaccaggauacggaugugccgcggaucgagcugaagaacaaaggagacaucaagauggcuuaccuuauauagaugauucaccaucaaguucgccacauuuaucuagcaaaggaagaggaagucgcgaugcauuaguuaguggagcauuagaaaguaccaaagcaagcgaacuagauccuguaaaaaugacaccaacauuuaguuuacacuguaugauacuauggccaguagaaauaacauuauaa

SEQ ID NO: 3561 - RNA, 1221 nt, Artificial Sequence
  ABX82714 variant
augguagauccaguaggauucgcugaagcauggaaagcacaauuuccugauucagaaccaccucgaauggaauugagaaguguaggagauauagagcaagaauuagaaagauguaaagcuagcauaagaagacuagaacaagaaguuaaucaggaaagauuuagaaugauauauuugcaaacacuauuagcaaaagaaaaaaaaucauaugauagacaaagauggggauuccgaagagcagcacaagcaccagauggagcuucagaaccaagagccucggcaucgcgaccacaaccagcaccagcagauggcgcagacccuccaccagcagaagaaccagaagcaagaccagauggagaagguagcccuggaaaagccagaccaggaacagcaagaagaccaggagccgcagcaaguggagaaagagaugacagaggaccacccgcaaguguugcagcauuaagauccaauuuugaaagaauacgaaaaggacacggucaacccggagcagaugcugaaaaaccauucuauguaaauguagaauuucaucaugaaagagguuuaguuaaaguaaacgacaaagaagucucagauaggauuucaagcuuaggaucacaagcaaugcaaauggaacgaaaaaaaucacaacauggagcaggaucuaguguuggagaugcaucaagaccaccuuauagaggaagaagcucagaaucaucuuguggagucgauggcgauuaugaagaugcagaacuaaauccaagauucuuaaaagauaaccuaauagaugcuaacggaggcucaagaccaccauggccaccauuagaauaucaaccuuaccaaucaauauacgucggaggaaugauggaaggagaaggaaaaggaccacuacuaagaucacaaagcacaagugaacaagaaaaaaggcuuacauggccaagaagaucauauucaccccgaucauuugaagauugcggaggaggauacacaccugauugcucgagcaaugaaaauuuaacaaguagcgaagaagauuucagcucuggucaaaguucaagaguaaguccaaguccaacaacauauagaauguuucgagauaaaucaagaaguccaucacaaaauucacaacaaucauuugauagcucaaguccaccaacuccucagugucauaaaaggcauagacacugcccugucguaguaucagaagcaacaagcggacaauaa

SEQ ID NO: 3562 - RNA, 2346 nt, Artificial Sequence
  AAH58926 variant
auggcaacacaagcagauuuaauggaauuagacauggcaauggaaccggaucgaaaagcugcagucucacauuggcaacaacagucuuaccuagauucaggcauucacagcggugcaacuacaacagcaccaucacuuucuggaaaaggaaauccagaagaagaagaugucgacacaagucaaguauuauaugaaugggaacaaggauucucacaaucauuuacccaagaacaaguagcugauauugauggacaauaugcaaugacgcgggcccaaagaguaagggcagcuauguuccccgaaacauuagacgaaggaaugcaaauuccaucaacucaauuugaugcugcccacccaacgaacguacaaagacuagcagaacccucacaaauguuaaaacaugcugucgugaaucuaauaaacuaccaagaugaugcagaacuagccacucgagcuauaccagaauuaacaaaacuacuaaacgaugaagaucaaguaguaguaaauaaagcagcaguaaugguccaccaacuuuccaagaaagaagcaucaagacaugcaauuaugagaucaccacaaaugguuucagcaauaguuagaaccaugcaaaauacaaaugauguagaaaccgcuagaugcacugcaggaacguuacauaacuuaucccaucacagagaaggacucuuagcaauauuuaaaaguggaggaauaccugcccuaguuaaaaugcuuggaucaccaguugacagcguauuauucuaugcaauaacgacacuucauaaucuuuuacuucaccaagaaggggcuaaaauggcaguaagauuagcuggggguuuacagaaaaugguagcucuacucaauaaaacaaacguaaaauuucucgcuauaacaacugacuguuuacaaauccuagcauacggaaaucaagaaucaaaacuuauaauacuagcaucagggggaccacaagcauuagucaauaucaugagaacauacacauaugaaaaacuacuauggacgaccucacggguauuaaaaguauuaucagucuguucaucaaauaaaccagcuaucgucgaagcuggaggaaugcaagcgcuaggauuacaucucacugauccaagucaaagauuaguacaaaauugccuauggacacuacgaaacuuaucagacgcagcuacuaaacaagaaggaauggaaggacuauuaggaacuuuaguacaacuuuuaggaucagaugauauaaacguaguaacaugugcagcaggaauacuuucaaauuuaacuugcaacaacuacaaaaacaaaaugaugguaugccaaguaggcggaauagaagcucugguaagaacaguauuacgagcaggagacagagaggauaucacagaaccagccauaugugcccuucgacaccuuacaucacgacaccaagaagcugaaauggcacaaaaugcaguuagacuacauuacggacuucccguuguuguaaaauuauuacacccaccuucacauuggccucuaauaaaagcaaccgucggcuuaauuagaaacuuagcacucugcccagcuaaucacgcaccuuugagagaacaaggagcuauaccaaggcuuguacaauuacuuguaagagcgcaccaggacacacaacgaagaacaaguaugggagguacacaacaacaauucguugaagggguaagaauggaagaaauuguagaaggaugcacaggugcuuuacauauauuggcaagagauguacauaauagaauuguuauuagagguuuaaauacaauaccucucuucguacaacuuuuauauuccccuauugaaaauauacaacgaguagccgcaggcguacuuugugaacuagcacaagacaaagaagcggcugaagcaauagaagcggaaggagcaaccgcuccacuaacggaauuacuucauucaagaaaugaagguguagcaacauacgcagcagcaguucuauuuagaaugucagaagauaaaccacaagacuacaagaaacgcuuaucaguagagcuaaccagcucguuauuucgaacugaacccauggcuuggaacgaaacagcugaucuaggauuagauauaggagcacaaggagaaccauuaggcuauagacaagaugacccaucuuacagaaguuuccauucaggcggauaugggcaagaugcauuagguauggacccaaugauggaacacgaaaugggaggacaucauccuggagcugacuaucccguugauggccuaccagaucuaggacaugcucaagaucuaauggauggauuaccaccaggagauucaaaucaacuagccugguuugacacagauuuauaa

SEQ ID NO: 3563 - RNA, 1692 nt, Artificial Sequence
  AAI21007 variant
auggauguaggagaauuacuaucuuaccaaccaaaccgagguacaaaacgaccaagagacgacgaagaagaagaacaaaaaaugagaagaaaacaaacuggaacaagagaaagagguagauaccgagaggaagaaaugacaguagucgaagaagcugacgacgacaaaaaaagacuuuugcaaauaauagacagagauggagaagaggaagaagaagaagaagaaccacuagaugaaagcucaguuaagaaaaugauacuaacauucgaaaaacgaagcuauaaaaaccaagaauuacgaaucaaauucccagauaaccccgaaaaauucauggagagugaacuagaccuaaaugacauuauucaagaaaugcacguaguagcaaccaugcccgaucuuuaucaccuccuaguagaacuuaacgccguacaaucauuauuaggacuuuuaggccacgacaauacagacguaaguaucgcaguaguagauuuacuacaagaacuaacagauaucgauacauuacacgaaagugaagaaggagcagaaguacuuauagaugcacuaguugacggacaaguaguagcacuauuaguacaaaaucuagaacgacuagacgaaucagugaaagaagaagcagacggaguacacaacacacuggcgauaguugaaaauauggcagaauuucgaccugaaaugugcacugaaggcgcacaacaaggauuauuacaauggcuauuaaaacgacuaaaagcaaaaaugccauucgaugcaaacaaauuauauugcucagagguauuagcuauucuauuacaagauaaugacgaaaauagagaacuacuaggugaacuagauggaauagauguacuauuacaacaauuaagcguauucaaacgacacaauccaaguacagcagaagaacaagaaaugauggaaaaucuuuuugacagucuauguucaugucuaaugcuauccaguaauagagaaagauuuuugaagggagaaggauuacaacuaaugaacuuaauguuaagagaaaaaaaaauaucaagaagcucagcauuaaaaguauuagaucacgcaaugauuggaccagaaggaacagacaacugccauaaauuuguagauauucuaggcuuacgcacaauauucccacuauuuaugaaaaguccacgaaaaaucaaaaaaguagguacuaccgaaaaagaacaugaagaacaugucuguagcauauuagcuucauuauuaagaaaccuaagaggacaacaacgaacaagauuacuuaauaaauucaccgaaaacgauuccgaaaaaguagauagauuaauggaacuccacuuuaaauaucuaggcgccaugcagguagcugauaagaaaauagaaggugaaaaacacgacaugguaagaagaggagaaauaaucgauaacgauacagaagaagaauucuacuuacgaagacuagacgcaggacuguucguauuacaacacauauguuauauaauggccgaaauauguaacgcaaauguuccccaaauaagacaaagaguacaucaaauauuaaauaugagaggaucgaguauaaaaauagugagacauauaauaaaagaauacgcagaaaacauaggagacggaagaucaccugaauuuagagaaaaugagcaaaaaagaauacuaggacuacuugaaaacuuuuaa

SEQ ID NO: 3564 - RNA, 1833 nt, Artificial Sequence
  CCDS4772.1 variant
auggaaacagcuccaaaaccagguaaagauguaccgccuaaaaaagauaaacuucaaaccaaacgaaaaaaacccagaagauacugggaagaagaaacaguaccuaccacagcaggagcuaguccuggaccaccuaggaacaaaaaaaauagagaauuaagaccacaaagaccaaaaaaugcuuauauccuuaaaaaaucaagaauauccaaaaaaccacaaguaccaaaaaaaccacgagaauggaaaaauccagaaucucaaagaggccuaaguggcacucaagauccauuuccagguccagcaccaguuccuguagaaguaguacaaaaauuuuguagaauagauaaaucaaggaaacuaccacauaguaaagcuaaaacaagaaguagauuagaaguagccgaagcugaggaagaagagacuucaauaaaagcugcaaggagugaacuauuacuagccgaagaaccaggauuuuuagaaggagaagauggcgaagauacagcaaagauaugucaagcagacauuguugaagccguugauauagcaucggcugcaaaacauuuugauuuaaaucuaaggcaauucggaccuuaccgacucaauuauucuagaacgggcagacaccuagcuuuuggcggacgacgaggucacguagcagcucuagauuggguaacaaaaaaauuaaugugugaaauuaauguaauggaagcaguaagagacauaagguuucuucauucagaagccuuauuagcuguagcacaaaaucgauggcuacauauauaugauaaccaaggaauagaacuacacuguauaaggagaugugaucgcguaacaagauuagaauuucuacccuuucauuuucuccucgcaacagcaucggaaacaggauuccuaacuuacuuagacguaagcguaggaaaaauaguagcagcacuaaaugcuagagcagggagacuagauguaaugagucaaaacccauauaacgcagugauacaucuuggacauaguaauggaacaguaucauuauggucccccgcgaugaaagaaccacuagccaaaauucuaugucaccgaggaggcguaagggcuguagcaguagacagcacaggaacuuacauggcaacaaguggauuagaucaccaacuaaaaauauucgaucuaagaggaacauaucaaccacuuagcacaaggacucucccacauggagcaggacaucuugcauucucacaaagaggacuauugguugcuggaaugggagaugucguaaauaucugggccggacaagguaaggcaucaccuccaucuuuagaacaaccauaccuaacacaucgacugucagguccaguacauggacuucaauuuugcccauuugaagacguacuaggagucggucauaccggagggauaaccaguauguuaguaccuggagcaggagaaccaaauuucgacggauuagaaucgaacccauacagaaguagaaaacaaagacaagaaugggaaguaaaagcguuauuagaaaaaguaccagcagaacuaauaugucuagauccaagagcauuagcagaaguugauguaauaucauuagaacaaggcaagaaagaacaaauugagagauuaggcuacgauccacaagcaaaagcaccauuucaacccaaaccaaaacaaaaaggacgaaguaguacugcuagccuaguaaaacgaaaaagaaaaguaauggaugaagaacauagggacaaagucagacaauccuuacaacaacaacaccauaaagaagcaaaagcuaaaccuacaggagcacgcccaagugcacuagauagauuuguccgauaa

SEQ ID NO: 3565 - RNA, 897 nt, Artificial Sequence
  AAG37878 variant
augggaccaaaagauagugcaaaauguuuacacagagguccacaaccaucacauugggcagcaggagauggaccaacacaagaaagauguggcccaagaaguuuaggaucaccaguauuagguuuagauacuugcagagcaugggaucauguagacggacaaauauuaggccaauuaagaccauuaacagaagaagaagaagaagaaggagcaggagcaacauuaaguagaggaccagcauuuccaggaaugggaagcgaagaauuaagauuagcuagcuuuuaugauuggccacuaacagcagaaguaccaccagaauuauuagcagcagcaggcuucuuucauacaggacaucaagauaaaguaagaugcuuuuucuguuacggaggauuacaaucauggaaaagaggugacgauccauggacagaacaugcaaaaugguuuccaucuugucaauuuuuauuaagaucuaaaggaagagacuuuguacauucaguccaagaaacacacucacaauuauuagguagcugggauccaugggaagaaccagaagaugcugcaccaguagcaccaaguguaccagcaagcggauauccagaauuaccaacaccaaggcgagaaguacaaucagaaagcgcacaagaaccaggaggaguaagcccagcagaagcucaaagagcaugguggguauuagaaccaccaggagcaagagauguagaagcacaauuaagaagacuacaagaagaaagaacauguaaaguaugccucgauagagcuguaucaauaguauuuguaccauguggucacuuaguuugugcagaaugugcgccaggacuacaauuauguccaauauguagagcaccaguaagaaguagaguaagaacauuuuuaucauaa

SEQ ID NO: 3566 - RNA, 2280 nt, Artificial Sequence
  EAW60925 variant
auggaccuauccgcacuacguguagaagaaguucaaaauguaauuaacgcaaugcagaaaauacucgaaugcccaauaugccuugaacuaauaaaagaacccguaucaacuaaaugcgaccacauauuuuguaaauucuguauguuaaaauuacuaaaucaaaagaaagguccaucacaaugcccacuaugcaaaaacgauauaacuaaaagaucauuacaagagucaacaagguucucacagcuaguagaagaacuacuaaaaauuaucugugcauuccaacucgauacaggauuagaauaugcuaacucauacaauuucgcaaagaaagagaacaacucaccugaacaucuaaaagaugaaguaucaauaauacaaagcaugggauauagaaaccgagcaaaaagacuccuucaaucagaaccagagaauccuagcuuacaagaaacuagcuugucaguacaacuaaguaaucucggaacaguacgaacauuaagaacaaaacaacgcauucaaccacagaaaacaucaguauauauagaacuaggcucggacucaagugaagacacaguuaauaaagcuacauacuguucaguaggugaccaagaauuacuacaaaucacuccacaagguacaagagaugaaauuucccuagauucugccaagaaagcagcaugugaguucagugaaacugauguuacgaauaccgaacaccaucaaccaucgaacaaugaccuaaacacaacugagaaaagggccgcagaacgacaucccgaaaaauaucaaggagaagccgcaaguggaugcgaaucugaaacuucaguaucagaagauugcucaggguuaagcucacaaucggacauucuuacuacccaacaaagagauaccaugcaacauaaucuuauaaaauuacaacaagaaauggcagaacuagaagcagucuuagaacaacauggaagccaaccaucaaauucauacccaucaaucauaagcgacucaucagcauuagaagaucuacgaaaccccgaacaauccacaucugaaaaaguauuaaccucacaaaaaucuagugaauacccaauaucacaaaauccugaaggacuaucagcagauaaauucgaaguaucagccgacaguaguacaucuaaaaacaaagaaccgggaguagaacgcucaagccccaguaaaugcccuucacuagacgaucgaugguacaugcacucaugcaguggaucucuacaaaauagaaacuauccaagucaagaagaacuaauaaaaguaguagacguagaggaacaacaauuagaagaaucaggaccccacgauuuaacagaaacaucauauuuaccuagacaagauuuagaagggacaccauacuuagaaagcggaauuagucuauuuucagacgauccagaaucagacccaagcgaagacagagcaccagaaagugcacgagugggcaacauaccaagcucaacaucagcuuuaaaaguaccucaauuaaaaguugcagaaucagcacaaucuccagcagcugcacacaccacagacacagccggguacaacgcaauggaagaaucaguaagcagagaaaaacccgaacuaacagccuccacagaacgagucaacaaacgcaugucaaugguaguaucaggguuaacacccgaagaguucaugcuuguuuacaaauucgcacgaaaacaccauauaacacuaacuaaccuaaucacagaagaaaccacacacguaguaaugaaaacagaugcagaauuuguaugugaaagaacuuuaaaauacuuuuuaggaauagcaggaggaaaauggguaguaucauacuucuggguaacacaaaguauaaaagaaagaaaaaugcuaaaugaacaugauuucgaaguaagaggugacguaguaaacggaagaaaucaucaaggaccaaaaagagcaagagagucccaagacagaaagaucuucagagguuuggaaauauguugcuacgguccauucacgaauaugcccacagaucaauuggaauggaugguacaacuaugcggugcgucaguaguaaaggaacuuucuagcuuuacucuuggaacuggcgugcauccgauagugguaguccaaccagaugcauggacagaagacaacggauuccacgcuauaggccaaaugugugaagcccccguugucacaagagaauggguauuagauucaguagcauuguaucaaugucaagaacuugauaccuaccuuauuccacaaauaccucauucacauuauuaa

SEQ ID NO: 3567 - RNA, 2160 nt, Artificial Sequence
  EAW60922 variant
auggaucucagcgcccuacgaguagaagaaguccaaaacguaauaaaugcuaugcaaaaaauauuagaaugcccuauuugucuagaauuaauuaaagaaccaguuucaacaaaaugcgaucacauauucugcaaauucugcaugcuaaaauuacucaaccaaaaaaaaggaccaucccaauguccucucugcaaaaaugacaucacuaaacgaucauuacaggaaucaacaagauucucacaauuaguagaagaauuacuaaaaauaauaugcgcauuucaacuagacacaggucuagaauaugcaaacagcuacaauuucgcaaaaaaagaaaacaauucaccagaacaccuaaaagaugaaguguccauaauacaaucuaugggauaucgaaauagagcaaaacgacuacuacaaucagaaccugaaaauccaucauuacaggaaacaucacucucuguucaacuaucaaaucuuggcaccguaagaacauugagaaccaaacaacgaauacaaccucaaaaaaccuccguauacauagaauuagccgcaugcgaauuuucagagacagacguaacgaauacagaacaccaccagcccucuaauaaugacuuaaacacaacagaaaaaagagcagcagaacgacacccagaaaaauaccaaggagaagcugcaucagguugcgaaagcgaaacauccguaagugaagacuguucaggacuaucuucacaaagugacauacuuacuacccaacaaagagacaccaugcaacacaaucuaauaaaauuacaacaagaaauggccgaacuagaagcaguauuagaacaacacggaucacaaccaucaaacucauaccccucaauaauaucagacucaucagcacuugaagacuuacguaauccagaacaaaguacuagcgaaaaagcaguacuaacaagccaaaaaucuucagaauaucccaucucacagaaccccgaaggacuaagugccgacaaauucgaaguaucagcagacaguaguacuucaaagaauaaagaacccggaguagaaagaucaaguccuucgaaaugcccaucauuagacgacagaugguacaugcauucauguucuggcucacuacaaaacagaaacuauccaucacaagaggaacuaauaaaagucguugauguagaagaacaacaacuagaagaaaguggaccacaugaucuuaccgaaacuucauauuuaccuagacaagaccuagaaggaacccccuaucuagaaucaggaauaucacuauuuuccgacgacccagaaucagauccaucagaagaccgagcaccugaaucagcgagaguagguaacauaccaucaucuacaucagcacuaaaaguaccccaguuaaaaguagcugaaagcgcacaaagcccagccgcagcacacacgacagacacagcugguuacaacgcaauggaagaaucaguaucaagagaaaaacccgaacuaacggcaagcacagagagaguaaauaaaagaauguccaugguaguaucaggcuugacccccgaagaguucaugcuagucuacaaauucgcaaggaaacaucauaucacgcuaacaaaccuuauaacugaagaaacaacacauguaguaaugaaaacagacgcagaauucguaugugaaagaacacuuaaauacuuucuaggaauugcaggaggaaaauggguagucucauacuucuggguaacccaaaguauaaaagaacgaaaaauguuaaacgaacaugauuucgaaguuagaggagacgucguuaacggaagaaaccaucagggaccaaaaagagcuagagaaucccaagauagaaaaauauucagaggccuagaaauauguuguuaugguccauucacaaauaugccaacagaccaauuagaauggaugguccaauuaugcggugcaagcguagucaaagaauuaucgaguuucacauugggcacaggcguacaccccauuguagucguacaaccagacgcauggacagaagacaauggauuucaugcaauaggacaaaugugugaagcaccaguaguaacuagagaaugggucuuagacucaguagcacuauaccaaugccaagaauuagacacauaucuuauuccacaaauaccacauucacacuauuaa

SEQ ID NO: 3568 - RNA, 2166 nt, Artificial Sequence
  EAW60923 variant
auggaucuguccgcacuacgcgucgaagaaguacaaaacguaaucaacgcaaugcaaaaaauucuagaaugcccaaucugucuagaacuaaucaaagaaccaguaucaaccaaaugcgaccauauauuuuguaaauucugcaugcuaaaauuauuaaaccaaaaaaaaggacccucacaauguccauuaugcaaaaacgacauaacaaaaagaucacuacaagaaaguacaagauuuucgcaacuaguagaagaauuacucaaaauaauaugcgcauuucaauuagacacaggacuggaauaugcaaacuccuacaacuucgccaaaaaagaaaauaacuccccagaacacuuaaaagaugaaguauccauaauucaaaguaugggcuaccgaaauagggcaaaaagauuacuacaaucagaaccagaaaacccaucauuacaagaaacaucacuaucaguacagcuauccaaccuagguacaguaagaacacuaagaacaaaacaacggauacaaccacaaaaaaccuccguauacauugaacuuggauccgacucaucagaagacacaguaaauaaagccacauacugcucaguaggugaucaagaacuuuuacagauaacaccacaaggaacacgugaugaaauaagcuuagauucggccaaaaaaggagaagcugcaagcggaugcgaaucagaaaccucagucucagaggauuguucaggacuaucaucucaaucagauauucucaccacacaacaaagagauacaaugcaacacaaccuaaucaaauuacaacaagaaauggcagaauuagaagccgucuuagaacaacacggaucccaacccucuaacaguuacccaucaauuaucucggauuccagcgcacuagaagacuugcgaaacccagaacaaaguacauccgaaaaagcaguuuuaacaucucaaaagucauccgaauacccaauaucacaaaaccccgaaggauuaucagccgacaaauucgagguaucagcagacucaucaacaucaaaaaacaaagaaccaggcgucgaacgaucuagucccaguaaaugccccuccuuagacgaucgaugguacaugcacucaugcuccggaagcuuacaaaauagaaacuacccaucacaagaagaacuaaucaaaguaguugacguagaagaacaacaacucgaagaaucgggcccucaugaccucaccgaaacaagcuaucuaccaagacaagaucuagaaggaacaccuuaccuagaaaguggaauaucucuauucucagacgauccagaauccgacccuucagaagauagagcaccagaaagugcaagaguuggaaacauaccaucauccacaucugcacuaaaaguaccacaacuaaaaguagccgaaucagcacaaagucccgcagcagcccacaccaccgacacugcuggauacaacgcaauggaagaaaguguaaguagagaaaaacccgaacuaacagccagcacagaaagaguuaauaaaagaaugagcaugguaguaagcggauuaacaccagaagaauucaugcuaguauauaaauuugcucguaaacaccauaucaccuuaacuaaccuaauaacagaagaaacaacacaugugguaaugaaaacagacgcagaguucguuugugaaagaacauuaaaauacuuuuuaggaauagcaggcggaaaauggguaguaagcuauuuuuggguuacacaaucaaucaaagaacgaaaaaugcuaaacgaacaugauuucgaaguaagaggcgaugucguaaacggcagaaaccaccaaggaccaaaaagagcaagagaaucacaagacagaaaaaucuuuaggggcuuagaaauaugcugcuaugguccauucacaaacaugcccacugaccaacuagaauggaugguccaauuauguggagcuucagucguuaaagaacucucgucauuuacauuaggaacagggguacauccaauagucguaguucaacccgacgcauggacagaagauaacgguuuccacgccauaggccaaaugugugaagccccaguaguaacaagagaauggguccuagacucgguagcacuuuaccagugccaagaauuagacacauauuuaauaccacaaaucccucacucacacuacuaa

SEQ ID NO: 3569 - RNA, 36 nt, Artificial Sequence
  AIC83575 variant
auggauuugagugcguuaaggguagaggaaguguga

SEQ ID NO: 3570 - RNA, 522 nt, Artificial Sequence
  ABC59810 variant
auggaugcagaauuuguaugcgaaagaacauuaaaauacuuccuaggaauagcaggaggaaaauggguaguaaguuauuucuggguaacacaaucaauaaaagaaagaaaaauguuaaaugaacaugacuuugaaguaagaggagacguaguaaauggaagaaaucaucaaggaccaaaaagagcaagagaaagucaagauagaaaaauauucagaggauuagaaauauguuguuacggaccauuuacaaauaugccaacagaucaacuagaauggaugguacaauuaugcggagcaucaguaguaaaagaacuaagcucauuuacauuaggaacaggaguacacccaauaguaguaguacaaccagacgcauggacagaagauaacggguuccaugcaauaggacaaaugugugaagcaccagugguaacaagagaauggguacuagauaguguagcauuauaucaaugucaagaauuagauacauacuuaauaccacaaauaccacauagucauuauuaa

SEQ ID NO: 3571 - RNA, 1065 nt, Artificial Sequence
  ABC88652 variant
augcacagcuguucagguagucuacaaaacagaaauuacccaucacaagaagaauuaauaaaaguaguagauguagaagaacaacaauuagaagaaucaggaccacaugaucuaacagaaaccucauaccuacccagacaagaucuagaaggaaccccauauuuagaaaguggaaucagccuauucagugaugauccagaaagugacccuucagaagauagggcaccagaaagcgcacgaguaggaaacauaccaaguagcacuucagcacuaaaaguaccacaauuaaaaguagcagaaagcgcacaaggaccagcagcagcacauacaacagauacagcaggauacaacgcaauggaagaaucaguaagcagagaaaaaccagaacuaacagcaucaacagaaagaguaaauaaaagaaugucgaugguugucagcggacucacacccgaagaauuuauguuaguauauaaauucgcacgaaagcaucacauaacauuaacaaaccuaauaacagaagaaacaacacacgucguaaugaaaacagacgcugaguucguaugugaaagaacauuaaaauauuuucuagguauagcaggcggaaaauggguaguaaguuacuucuggguuacucaaaguauaaaagaaagaaaaauguuaaaugaacaugauuucgaaguacgaggagauguaguaaauggaagaaaccaucaagggccaaaaagagcaagagaaagucaagacagaaaaauauucagaggauuagaaauaugcugcuacgguccauuuacaaauaugccaacugaucaacuagaauggaugguccaauuaugcggagcaucaguaguaaaagaauuaucaaguuuuacauuaggaacaggaguacauccaauaguaguaguacaaccagacgcauggacagaagacaaugguuuucacgcaaucggacaaaugugcgaaacaccaguaguaacaagagaauggguauuagauucagucgcuuuauaccaaugucaagaacucgauacauaucuaauaccacaaauaccacacucacacuauuaa

SEQ ID NO: 3572 - RNA, 2043 nt, Artificial Sequence
  EAW60939 variant
auggaccuaucugcacuuaggguagaagaaguacaaaacguuauaaacgcaaugcagaaaauacuagaaugccccauauguuuagaauuaauaaaagaaccagucucuacuaaaugugaccacaucuucuguaaauucuguaugcuaaaauuacuaaaucaaaagaaagguccaagucaaugccccuuaugcaaaaacgauauaacaaaacgcucacuacaagaaaguacccgcuuuucacaauuaguagaagaauuacuaaaaauuauuugcgcauuccaacuugacacagguuuagaauaugccaacucuuacaacuuugcuaagaaagaaaauaauucacccgaacaccugaaagaugaaguaagcauaauucaaucaaugggcuaccgaaacagagccaaaagauuauugcaaagugaaccagaaaacccuucauuacaagaaacgagcuuaagcguucaacucuccaacuuagguacaguucggacauuaagaacaaaacaacgaauacaaccacagaaaacaaguguuuacauagaauugggagaagcagccagcgggugcgaaagugaaacaagcguaucagaagacugcagugguuuaucuucucaaucagacauacuaacaacacaacaaagagauacaaugcaacauaaccucauaaaacuccaacaagaaauggcagaauuagaagccguucuagaacaacacggcucacaaccaucaaacaguuacccaucaaucaucucagacucuagugcauuagaagaucucaggaacccagaacaaagcaccagcgaaaaagcaguacuuacaucacaaaaauccagcgaauacccaauaucucaaaacccagaaggucuaucagcagauaaauuugaaguaagcgcagacucaucaacaagcaaaaauaaagaaccaggaguugaaagaucaucaccaucgaaaugcccaucauuagacgaucgaugguacaugcacucaugcagcggaaguuuacaaaaccgaaacuauccaucucaagaagaauuaauaaaaguaguagacguugaagaacaacaauuagaagaaagugguccacacgauuuaacagaaacaagcuauuuaccaaggcaagacuuagaaggaacuccauaccuggaaaguggaauaaguuuauuuagugacgauccagaaagcgauccaucagaagauagagcucccgaaagugccagagucggaaacauaccgucuucaacuucagcucuaaaaguaccacaacuaaaaguagcagaauccgcgcaaucaccagcagcagcccauacaacagauaccgcaggauacaacgcaauggaagaaucuguaucaagagaaaaaccagaacuaacagcaucaacugaaagaguaaauaaaagaaugucaauggucguaucaggacuuacaccagaggaguucauguuaguauacaaauucgcacgaaaacaucacauaacuuuaacaaaucuuaucacagaagaaaccacccacguagugaugaaaacagacgcagaguucgucugcgaacgcacucuuaaguacuuuuuaggaauagcugguggaaaauggguaguuucauacuucuggguaacacaaucgauuaaagaaagaaaaaugcuaaacgaacaugacuucgaaguaaggggcgacguaguaaacggcagaaaucaccaaggaccaaaaagagcacgugaaucacaagauagaaaaauauuuagagguuuagaaaucugcugcuacggaccuuuuacuaacaugccaacugaccaauuagaauggaugguacaacuauguggagcaucaguaguaaaagaacuaucaaguuucacacuaggaacaggaguccauccaaucguaguuguacaaccagacgcauggaccgaagacaacgguuuucaugcaauaggacaaaugugugaagcaccaguaguaacaagagaauggguacuagacucaguagccuuauaucaaugucaagaacuagauacguaucuaauaccacaaauaccacacagucacuauuaa

SEQ ID NO: 3573 - RNA, 546 nt, Artificial Sequence
  AAC72302 variant
auguuacuagaaccaggaagaggaugcugugcauuagcaauacuauuagcaauaguagauauacaaagcggaggauguauaaauauaacaagcucagcaucacaagaaggaacaagauuaaaccuaauauguacaguauggcacaaaaaagaagaagcagaaggauuuguaguauucuuaugcaaagacagaucaggagacuguucaccugaaacaagcuuaaaacaacuaagacuaaaaagagauccaggaauagauggaguaggagaaauaaguagccaacuaauguucacaauaucacaaguaacaccauuacauagcggaacauaucaauguugcgcaagaucacaaaaaagcggaauaagacuacaaggacauuucuuuucaauacuauuuacagaaacaggaaacuauacaguaacaggacuaaaacaaagacaacauuuagaauucucacacaaugaaggaacauuaagcucaggauuucuacaagaaaaaguauggguaaugcuaguaacuucacuaguagcauuacaagcacuauaa

SEQ ID NO: 3574 - RNA, 639 nt, Artificial Sequence
  BAG58223 variant
augcuauuaagcguauacuuuaaagaacaauuccuagacggagacggauggacaucaagauggauagaaagcaaacacaaaucagacuucggaaaauucguacuaucaucaggaaaauucuacggagacgaagaaaaagacaaaggacuacaaacaucacaagacgcaagauucuacgcacuaagcgcaagcuuugaaccauucuccaacaaaggacaaacacuaguaguacaauucacaguaaaacacgaacaaaacauagacugcggaggaggauacguaaaacuauucccaaacagccuagaccaaacagacaugcacggcgacagcgaauacaacauaauguucggaccagacauaugcggaccaggaacaaaaaaaguacacguaauauucaauuacaaaggaaaaaacguacuaauaaacaaagacauaagaugcaaagacgaugaauucacacaccuauacacacuaauaguacgaccagacaacacauacgaaguaaaaauagauaacucacaaguagaaucaggaucacuagaagacgacugggauuuccuaccaccaaaaaaaauaaaagacccagacgcaucaaaaccagaagacugggacgaaagagcaaaaauagacgacccauaa

SEQ ID NO: 3575 - RNA, 891 nt, Artificial Sequence
  BAG65301 variant
augcacggagacagcgaauacaauauaauguucggaccagacauauguggaccaggaacgaaaaaaguacauguaauauucaacuacaaaggaaaaaauguauuaauaaauaaagacauaagaugcaaagacgaugaauucacacacuuauacacucuaauaguaagaccagacaacacauacgaaguaaaaauagauaacucacaaguagaaaguggaucacuagaggacgacugggauuucuugccaccgaaaaaaauaaaagauccagacgcaagcaaaccagaagacugggacgaaagagcaaaaauagacgauccaacagacagcaaaccagaagacugggauaaaccagaacauauaccggacccagaugcgaaaaaaccagaagauugggacgaagaaauggacggagaaugggaaccaccaguaauacaaaauccagaauacaaaggagaauggaaaccaagacaaauagauaauccagacuauaaaggaacauggauacacccagaaauagauaacccggaauacaguccagacccaagcauauacgcauacgacaacuuuggaguacuaggauuagacuuauggcaaguaaaaucaggaacaauauuugacaauuucuugauaacaaacgacgaagcauacgcagaagaauucggaaacgaaacauggggaguaacaaaagcagcagaaaaacaaaugaaagacaaacaagaugaagaacaaagacuaaaagaagaagaagaagauaaaaaaagaaaagaagaagaagaagcagaagacaaagaagacgaugaagacaaagacgaagacgaagaagacgaagaagacaaagaagaagacgaagaagaagacguacccggacaagcaaaagacgaacuauaa

SEQ ID NO: 3576 - RNA, 1254 nt, Artificial Sequence
  AAA36582 variant
augcuuuuaaguguuccauuauuauugggacuauuaggacuagcgguugcagaaccagcaguauauuuuaaagaacaguuucuagauggagauggauggacuucacgcuggauagaaaguaaacauaaaagcgauuucggaaaauuugucuuaagcucaggaaaauuuuauggagaugaagaaaaagauaaaggauuacaaacaucacaagaugcuagauucuacgcauuaagcgcaagcuuugaaccauucucaaauaaaggacaaacacuagucgugcaauuuacaguaaaacacgaacaaaacauagacugcggaggaggauauguuaaacuauuuccaaauagccuagaccaaacagauaugcauggagauagugaauacaauauaauguucggaccagauauauguggaccaggaacgaaaaagguacauguaauauuuaauuauaaaggaaaaaacguacuaauaaacaaagacauaagauguaaagaugacgaauucacacaccuauacacacuaauaguuagacccgauaacacauaugaaguaaaaauagauaacagucaaguagaaucaggaagucuugaagaugauugggauuuccuaccaccgaaaaaaauaaaagacccagacgccaguaagccagaagacugggacgaaagagcaaaaauagacgauccaacagacucaaaaccagaagauugggauaaaccagaacauauaccagauccagacgcaaaaaaaccagaagacugggaugaagaaauggauggugaaugggaaccaccaguaauacaaaacccagaauauaaaggagaauggaaaccacgucaaauagauaacccagacuauaaaggaaccuggauucauccagaaauagauaacccagaauacagcccagacccuaguauauacgcuuacgauaacuuuggaguauuaggguuagaucuauggcaaguaaaaaguggaacaauauuugauaauuuucugauaacaaaugacgaagcauacgcagaagaauucgggaaugaaacauggggaguaacaaaagcagcagaaaaacaaaugaaagauaaacaagaugaggaacagagauuaaaagaagaagaagaagauaaaaaacgaaaagaagaagaggaagcagaagauaaagaagaugacgaagacaaagaugaagacgaagaagaugaagaagauaaagaagaagaugaagaagaagacguuccaggacaagcaaaagacgaauuauaa

SEQ ID NO: 3577 - RNA, 1155 nt, Artificial Sequence
  BAB71655 variant
auggccagagcccuaguccaacuaugggcaauaugcaugcuaagaguagcccuagcaacaguauauuuccaagaagaauuuuuagacggagaacacuggcgaaacagaugguuacaaaguacaaacgacagcagauucggacacuucagauuaucaucaggaaaauuuuacggacacaaagaaaaagacaaagguuuacaaaccacccaaaacggaagauucuacgcuauaucagcaagauucaaaccauucucaaacaaaggaaaaacacucguaauacaauacacaguaaaacacgaacaaaaaauggacugcggaggaggauacauaaaaguauuuccagccgacauagaccaaaaaaacuuaaacggaaaaucacaauacuacauaauguucggaccagacauaugcggauucgacauaaaaaaaguccacgucauacuacacuucaaaaacaaauaccacgagaacaaaaaauuaauacgaugcaaaguagacggauuuacacaccuauacacacuaaucuuaagaccagaccuaaguuaugacguaaaaauagacggacaaaguauagaaucaggaagcauagaauaugacuggaacuuaacaaguuuaaaaaaagaaacaucaccagcugaaucaaaagauugggaacaaacaaaagacaauaaagcucaagauugggaaaaacauuucuuagacgcaucaacaucaaaacaaucagacuggaacggagaccuagauggagacuggccagcaccaauguuacaaaaaccaccauaccaagacggacuaaaaccagaaggcauacacaaagacguaugguuacacagaaaaaugaaaaacacagacuaccuaacacaauacgaucuaucagaauuugaaaacauaggagcaauaggacuagaacuauggcaaguacgaucaggaaccaucuuugacaauuuccuuauaacagacgacgaagaauacgcagacaacuucggaaaagcaacauggggagaaacaaaaggaccagaaagagaaauggaugcaauacaagcaaaagaagaaaugaaaaaagcaagagaagaagaagaagaagaacuauuaucaggaaaaauaaauagacacgagcacuacuuuaaccaauuucacagaagaaacgaacuauaa

SEQ ID NO: 3578 - RNA, 330 nt, Artificial Sequence
  CAA10193 variant
auguuaauggcacaagaagcauuagcauuuuuaauggcacaaggagcaauguuagcagcacaagaaagaagaguaccaagagcagcagaaguaccaggagcacaaggacaacaaggaccaagaggaagagaagaagcaccaagaggaguaagaauggcaguaccacuauuaagaagaauggaaggagcaccagcaggaccaggaggaagaacagcagcauguuuuaguuguacaaguagauguuuaaguagaagaccauggaaaagaaguuggagugcaggaaguuguccaggaaugccacauuuaagcccagaucaaggaagauuuuaa

SEQ ID NO: 3579 - RNA, 1440 nt, Artificial Sequence
  CAA66853 variant
auggauuucucaagaaaucuauaugauauuggagaacaacucgacagcgaagaccuagcaucauuaaaauucuuaucacucgacuacauuccacaaagaaaacaagaaccaauaaaagacgcauuaaugcuauuccaacgauuacaggaaaaacguaugcuagaagaaucuaaccuaucauucuuaaaagaacuacucuuccgaaucaauagacuagaccuccuaauaacguacuuaaauacaagaaaagaagaaauggaacgagaacuacaaacaccuggaagagcccaaauaucggcauaccgagucaugcuauaucagaucagcgaagaaguaucacguucagaacuuagaagcuuuaaauuccuguuacaagaagaaauaucuaaaugcaaauuagaugacgauaugaaucuacucgacaucuucauagaaauggaaaaacgagucauacuaggagaaggaaaacuagacauauuaaaaagaguaugugcgcaaauaaauaagagcuuacuaaaaaucaucaacgacuacgaagaauuuaguaaagaaagaagcucaucccuagaaggaucaccagacgaauucucuaacggagaagaauuauguggaguaaugaccaucucagauucaccuagagagcaagauucagaaucacaaacauuagauaaaguauaccaaaugaaaucaaaaccaagaggauacugccuaauaauaaacaaccauaacuucgcaaaagcucgagaaaaaguuccaaaauuacacucaauacgagauagaaacggcacacaccuagacgcaggagcacuaacaacaacauuugaagaacuacauuucgaaauaaaaccacaugaugacuguacaguagaacaaauauacgaaauacuaaaaauuuaccaauuaauggaccacucaaacauggacugcuuuaucuguuguauauuaucacauggugauaaaggaauaauauacggaacagacggccaagaagcaccaauauacgaauuaacuucacaauuuacaggauuaaaaugcccaagccuagccggaaaaccaaaaguauucuuuauacaagcaugccaaggagacaauuaccaaaaaggaauaccaguagaaacagacucagaagaacaaccuuaucuggaaauggaucuaucaucaccacaaacuagauacauaccagacgaagcagauuuccuauuaggaauggcaacuguaaacaacugcguaucauacagaaacccagcagaaggcaccugguacauacaaucauuaugccaaucacuaagagaaagaugccccagaggagacgauauacuaacaauauuaacagaaguaaauuaugaaguaucaaauaaagaugacaaaaaaaacaugggaaaacaaaugccucaaccaacauuuacucuaagaaaaaaacuaguauucccaagcgacuaa

SEQ ID NO: 3580 - RNA, 1569 nt, Artificial Sequence
  CCDS2340.1 variant
augaaaucacaaggacaacacugguacucaucaucagacaaaaauugcaaaguaucauuccgagaaaaacuacuaauaaucgacucaaaccuuggaguucaagacgucgaaaacuuaaaauuccucugcaucggccucguacccaacaaaaaacuugaaaaauccaguucagcaagugacgucuuugaacaucucuuagccgaagaccuauuauccgaagaagacccuuucuuuuuagccgaacuacuuuacaucaucagacaaaaaaaacuucuacaacaccucaauugcacaaaagaagaaguagagagauuauuaccaacucgacaaagagugucauuauucagaaauuuacuuuaugaauuaucagaaggaauagacucugaaaaucuaaaagacaugauuuuccuacuaaaagacucacuaccaaaaaccgaaaugacuagccuaucauuccuggcauucuuagaaaaacaagggaaaauagaugaagauaacuuaacuuguuuagaagacuuauguaaaacaguaguaccuaaauuacuaagaaacauagaaaaauauaaaagagaaaaagcaauccaaaucguaacaccaccgguugacaaagaagcagaaucauaccaaggagaagaagaauuagucucacaaaccgauguaaaaacauuucuugaagcacuaccccaagaaucauggcaaaacaaacacgccggaucaaacgguaacagagcaacuaacggcgccccaucacuaguaucacgcggaaugcaaggagcuucagcuaacacuuuaaacucggaaacauccacaaaaagagcagcaguauauagaaugaauagaaaccauagaggucuaugcguaauaguuaauaaccacucauucacuucauuaaaagacagacaaggaacacacaaagacgcagaaauuuuaucucauguauuccaaugguuaggauuuaccguccacauccauaacaacguaacaaaaguagaaauggaaaugguccuacaaaaacaaaaaugcaauccagcacaugcagacggugacuguuuuguauuuuguaucuuaacccacggucgcuucggagcagucuacucaucugaugaagcacuaauaccuauaagagaaauaaugagccacuucacagcacuacaauguccacgauuagcagaaaaaccaaaauuauucuuuauacaagcaugccaaggugaagaaauccaaccguccguaagcauagaagcagacgcucuaaauccagaacaagcaccuacaucacuacaagacucaauaccugcagaagcggauuuccuacuaggccuugcaacuguaccaggguauguaucauuccgucauguagaagaaggaucaugguauauacaaucacuaugcaaucaucucaaaaaacuaguaccuagacacgaagauauacuaucaauauuaacagccguaaacgacgacguuucaagaagaguagacaaacaaggcacuaaaaaacaaaugccacaaccagcauucacauuaagaaaaaaauuaguauuuccuguaccacuugacgcccucucccuauaa

SEQ ID NO: 3581 - RNA, 1020 nt, Artificial Sequence
  EAW65632 variant
auguggcaauuaugggcaucauuauguuguuuauuaguauuagcaaaugcaagaucaagaccuagcuuucauccauuaucagaugaauuaguaaauuauguuaauaaacgaaauacaacauggcaagcaggacauaauuuuuauaauguagauaugucauauuuaaaaagauuauguggaacauuuuuaggaggaccaaaaccaccacaaagaguaauguucacagaagauuuaaaacuaccagcuagcuuugaugcaagagaacaauggccacaauguccaacaauuaaagaaauaagagaucaaggaucaugugguaguuguugggcuuuuggagcaguagaagcaauaagugauagaauaugcauacauacaaaugcccauguaucaguagaagugucagcagaagauuuauuaacauguugcggaagcauguguggagauggauguaauggaggauauccagcagaagcauggaacuucuggacaagaaaagggcuaguaagugguggauuauaugaaucacauguaggauguagaccauauaguauuccaccaugugaacaccauguaaacggaagucgaccaccauguacaggagaaggagacacaccaaaauguagcaaaauaugugaaccagguuauucaccaacauauaaacaagauaaacauuacggauauaauagcuacucaguaucaaauagugaaaaagacauaauggcagaaauauacaaaaauggaccuguagaaggggcauuuagcguauauucagacuuuuuauuauauaaaaguggcguauaucaacauguaacaggugaaaugaugggagggcaugcaauaagaauacuaggauggggaguagaaaauggaacaccuuauugguuaguagcaaauaguuggaauacagauuggggagauaauggauuuuucaaaauauuaagaggacaagaucacuguggaauagaaucagaaguagucgcaggaauaccaaggacagaucaauauugggaaaagauauaa

SEQ ID NO: 3582 - RNA, 1020 nt, Artificial Sequence
  AAC37547 variant
auguggcaauuaugggcaagcuuauguuguuuauuaguacuagccaaugcaagaagcagaccaaguuuucacccauuaucugaugaauuaguuaauuauguaaauaaaagaaauacaacauggcaagcaggucauaauuuuuauaauguugauaugucauaucuaaaaagauuauguggaacauuuuuaggaggaccaaaaccuccacaaagaguaauguuuacagaagaucuaaaacuuccagcaaguuuugacgcaagagaacaauggccacaauguccaacaauaaaagaaauacgagaucaaggaucauguggaaguuguugggcauuuggagcaguagaagcaauaucagauagaauauguauacauacaaaugcacacgucaguguagaaguaucagcagaagauuuacuaacauguuguggaucaauguguggagauggauguaauggaggauauccagcagaagcuuggaauuucuggacaagaaaagguuuaguaagcggaggauuauacgaaagccauguaggcugcagaccauauucaauaccaccaugcgaacaucacguaaauggaucaagaccuccauguacaggagaaggagauacaccaaaauguaguaaaauaugugaaccagguuauaguccaacuuauaaacaagacaaacauuauggauauaauucauauucaguaucaaauucagaaaaagauauaauggcagaaauuuauaaaaauggaccaguagaaggagcauucaguguauauucugauuuuuuacuauauaaaagcggaguuuaucaacacgucacaggagaaaugaugggaggacaugcaauaagaauacuaggauggggagucgaaaauggaacaccauauuggcuaguagcaaauuccuggaauacagauuggggagauaaugguuuuuuuaaaauacuaagagggcaagaccauuguggaauagaaucagaaguaguagcaggcauuccaagaacugaucaauauugggaaaaaauauaa

SEQ ID NO: 3583 - RNA, 1002 nt, Artificial Sequence
  EAW62731 variant
augaauccaacacuaauauuagcagcauuuuguuuaggaauagcaagugcaacauuaacauuugaucauagccuagaagcacaauggacaaaauggaaagcaaugcauaauagauuauauggaaugaaugaagaaggauggagacgagcaguaugggagaaaaauaugaaaaugauagaauuacauaaucaagaauacagagaagguaaacauagcuuuacaauggcaaugaaugcauuuggugauaugacgagcgaagaauuuagacaaguaaugaauggauuucaaaauagaaaaccaagaaaaggaaaaguauuucaagaaccauuauuuuacgaagcgccaagaagcguagauuggagagaaaaaggauauguaacaccaguuaaaaaccaaggccaauguggaagcuguugggcauuuagugcaacaggagcgcuagaaggacaaauguuuagaaagacaggaagauuaauaucacuaagugaacaaaauuuaguagauuguaguggaccacaaggaaaugaaggauguaaugggggauuaauggauuaugcauuccaauauguacaagauaauggaggauuagauagugaagaaaguuauccuuaugaagcaacagaagaaaguuguaaauauaauccaaaauauaguguagcaaaugacacaggauuuguagauauaccuaagcaagaaaaagcauuaaugaaagcaguagcaacaguaggaccaauaucuguagcaauagaugcaggacacgaaaguuuucuuuucuauaaagaagguauauauuuugaaccagauuguagcagugaagauauggaucauggaguguuaguuguaggauauggauuugaaagcacagaaucagauaauaacaaauacuggcuuguuaaaaauagcuggggagaagaauggggaaugggaggauauguaaaaauggcaaaagauagaagaaaucauuguggaauagcaucagcagcaaguuauccaacaguauaa

SEQ ID NO: 3584 - RNA, 1002 nt, Artificial Sequence
  AAA66974 variant
augaauccaacacuaauauuagcagcauuuuguuuaggaauagcaagcgcaacauuaaccuuugaucacucauuagaagcucaauggacaaaauggaaagcaaugcauaauagauuauaugguaugaacgaagaaggauggagaagagcaguaugggaaaaaaauaugaaaaugauagaauuacacaaucaagaauauagagaaggaaaacauaguuuuacaauggcaaugaaugcauuuggugauaugacaagcgaagaauuccgacagguaaugaauggauuucaaaacagaaaaccaagaaaaggaaaaguauuucaagaaccacuauuuuaugaagcaccaagaaguguagacuggagagaaaaaggauaugugacaccaguuaaaaaucaaggacaauguggaaguuguugggcauuuucagcaacuggagcauuagaaggacaaauguuuagaaaaacaggaagauuaauaaguuuaucagaacaaaacuuaguagauuguagcggaccacaaggaaacgaaggauguaauggaggauugauggauuaugcauuucaauacguacaagauaauggaggacuagauucagaagaaagcuauccauaugaagcaacagaagaaaguuguaaauauaacccaaaauauaguguagcaaacgacacuggauuuguagauauaccaaaacaagaaaaagcgcuaaugaaagcaguagcaacagucggaccaauaaguguugcaauagaugcaggacacgaaucauuucuauuuuauaaagaagggauauauuuugaaccagauuguucaagcgaagacauggaucauggcguauuaguaguaggauauggauuugaaaguacagaaucagauaauaauaaauauugguuaguaaaaaacucauggggagaagaauggggaaugggaggauaugugaaaauggcaaaagacagaagaaaucacuguggaauagcaucagcagcaaguuauccaacaguauaa

SEQ ID NO: 3585 - RNA, 456 nt, Artificial Sequence
  AAG17239 variant
auggauuacgcauuccaauacguacaagauaacggaggauuagacucagaagaaaguuauccauaugaagcaacagaagaaucaugcaaauacaauccaaaauacucgguagcaaacgauacaggauucguagacauaccaaaacaagaaaaagcauuaaugaaagcaguagcaacaguaggaccaauaucgguagcaauagaugcaggacacgaaagcuuucuauuuuacaaagaaggaauauauuucgaaccagauugcucaagcgaagacauggaccauggaguacuaguaguaggauacggauucgaaaguacagaaucagacaauaacaaauacugguuaguaaaaaauagcuggggagaagaauggggaaugggaggauacguaaaaauggcaaaagacagaagaaaucacuguggaauagcaucagcagcaagcuauccaacaguauaa

SEQ ID NO: 3586 - RNA, 984 nt, Artificial Sequence
  AAA51932 variant
auguuauuucuacuauuaccacuauuagcuguccuaccaggagacgguaaugcagacggacuaaaagaaccauuaaguuuccauguaacauggauagcaucauuuuauaaucauucauggaaacaaaauuuaguaucuggauggcuaucagaucuacaaacacauacuugggauagcaauucaucaacaauaguauucuuauguccauggucaagagguaacuuuucaaaugaagaauggaaagaauuagaaaccuuauuuaggauacgaacaauaagaucauuugaaggaauaagaagauaugcacaugaauuacaauuugaauauccauuugaaauacaaguaacaggaggaugugaauuacauucuggaaaaguaucagguaguuuucuacaacuugcauaucaaggaucagauuuuguaaguuuucaaaacaauucauggcuaccauauccaguugcaggaaacauggcaaaacauuucugcaaagucuuaaaucaaaaucaacaugaaaaugacauaacacauaauuuauuaagugauacuuguccaagauucauauuaggacuauuagaugcagguaaagcacauuuacaaagacaaguaaaaccagaagcaugguuaagucauggaccaucaccaggaccaggacacuuacaauuaguuugucaugucucaggauuuuaucccaaaccaguaugggucauguggaugagaggcgaacaagaacaacaaggcacacaaagaggagauauauuaccaucagcagacgguacaugguacuuaagagcaacauuagaaguugcagccggagaagcagcagauuuaaguuguagaguaaaacacucaucauuagaaggacaagacaucguauuauauugggaacaccacucuucaguaggauuuauaauacuugcaguaauaguuccauuacuacuauuaauaggucuagcacuaugguuuagaaaaagauguuuuuguuaa

SEQ ID NO: 3587 - RNA, 1002 nt, Artificial Sequence
  AAA51939 variant
augcuacuauuaccauuucaauuauuagcaguacucuuuccaggaggaaauagugaacaugcauuucaaggaccaacuucauuucauguaauacaaacuucaucauuuacaaacucaacaugggcacaaacacaaggaucaggauggcuagaugacuuacaaauacacgguugggauucagauucaggaacagcaauauucuuaaaaccauggucaaaaggaaauuuuucagacaaagaaguagcagaauuagaagaaauauuuagaguauauauauuugguuuugcaagagaaguacaagauuucgcaggagauuuucaaaugaaauauccauuugaaauccaaggaauagcaggaugugaacuacauucaggaggagcaauaguaucauuuuuaagaggagcuuuagggggauuagacuuuuuaaguguuaaaaaugcaucaugcguaccuucaccagaaggaggaucaagagcacaaaaauuuugugcauuaauaauucaauaucaaggaauaauggaaacaguaagaauccuacuauacgaaacuugcccaagauauuuauuaggaguauuaaaugcaggaaaagcagauuuacaaagacaaguaaaaccagaagcaugguuaucaagcggaccaucaccagguccaggcagacuacaauuaguaugucauguaagcggauuuuacccaaaaccaguauggguaauguggaugagaggagaacaagaacaacaaggaacacaacuaggagacauacuacccaacgcaaacuggacaugguaucuaagagcuacacuagauguagcagauggagaagccgcaggacuaucaugcagaguaaaacauucaucacuagaaggacaagauauaauauuauauuggagaaaccccacaucaauaggaucaauaguauuagcaauaauaguaccaucacuacuacuauuauuaugucuagcauuaugguacaugagaagacgaucuuaucaaaauauaccauaa

SEQ ID NO: 3588 - RNA, 1002 nt, Artificial Sequence
  AAI26466 variant
augcucuucuuacaauuuuuauuauuagcacuucuauuaccaggaggagacaaugcagacgccucacaagaacauguuagcuuucauguaauacaaauauuuucauuugucaaucaaucaugggcaagaggucaaggaucaggauggcuagaugaauuacaaacacauggcugggauucagaaucaggcacaauaauauuucuacacaauuggucaaaagguaacuuuucaaaugaagaacuaucugacuuagaauuacuauuucgauuuuaucuauucggauuaacaagagagauacaagaucaugccucacaagacuauucaaaauauccauuugaaguacaaguaaaagcaggaugugaauuacacucaggaaaaucaccugaaggauucuuucaagucgcauuuaacggacuagacuuacuauccuuucaaaauacaacauggguuccaucaccuggaugcggcucauuagcacaaucaguaugccaucuucuaaaccaucaauacgaaggagucacagaaacaguauauaaucuaauaagaucaacauguccaagauuucuauuaggacuacucgaugcaggaaaaauguauguacacagacaaguaagaccugaagcaugguuaaguucacgaccaucacuaggaucaggucaacuccuuuuaguaugccaugcaucaggauuuuauccaaaaccaguauggguaacauggaugagaaacgaacaagaacaauuaggaacaaaacacggagacauauuaccaaaugcagacggaacuugguauuuacaaguaauauuagaaguugcaucagaagaaccagcaggauuaucaugcagaguacgacauuccucauuaggaggacaagacauaauauuauauuggggacaucauuuuucaaugaacuggauagcacuaguaguaauaguaccacuaguaauauuaauaguacuuguauuaugguuuaaaaaacauugcuccuaccaagacauauuauaa

SEQ ID NO: 3589 - RNA, 1008 nt, Artificial Sequence
  AAA59672 variant
augggauguuuauuauuuuuacuauuaugggcauuauuacaagcauggggaucagcagaaguaccacaaagacuauucccauuaagauguuuacaaauaucaucauuugcaaauucaagcuggacaaggacagauggacuagcuugguuaggcgaacuccaaacacauagcuggucaaaugacagcgauacaguaagaucacuaaaaccauggucacaaggaacauuuucagaucaacaaugggaaacuuuacaacauaucuuuagaguuuauagaucuucuuuuacaagagacguaaaagaauucgcaaaaaugcuucgauuaaguuauccacuagaacuacaaguuucagcaggaugugaaguacauccuggaaaugcaucaaauaauuuuuuucauguagcauuucaagguaaagauauauuaucauuucaaggaacaucuugggaaccaacacaagaagcaccauuauggguaaacuuagcaauacaaguacuaaaucaagacaaauggacuagagaaacaguacagugguuauuaaauggcacauguccacaauuuguaucaggacuacuagaaucaggaaaaucagaauuaaaaaaacaaguaaaaccaaaagcaugguuaucacgaggaccaucaccuggaccaggaagacuacuuuuaguaugucacguaucaggauuuuauccaaaaccaguuuggguaaaauggaugagaggcgaacaagaacaacaaggaacacaaccaggagauauauuaccaaaugcagaugaaacaugguauuuaagagcuacacuagauguaguugccggagaagcagcaggauuaaguuguagaguaaaacauucaucauuagaaggacaagauauuguacuauacuggggaggaucauacacuucaauggguuuaauagcacuagcaguauuagcauguuuacuauuucuacuaauaguaggauuuacaucacgauuuaaaagacaaacaucauaucaaggaguacuauaa

SEQ ID NO: 3590 - RNA, 1167 nt, Artificial Sequence
  EAW52830 variant
auguuacuacuuuuuuuacuauuugaagguuuauguugcccuggcgaaaauaccgcagcaccacaagcauuacaaucauaccauuuagcagccgaagaacaacuaucauucagaauguuacaaacaagcucauucgcaaaccacucaugggcccauucagaaggauccggaugguuaggagaccuacaaacccaugguugggauacaguauuaggaacaauaagauuuuuaaaaccauggagccauggaaauuucuccaaacaagaauuaaaaaauuuacaaucacuuuuucaacuauauuuccacucauuuauccaaauaguacaagccucagcaggacaauuccaauuagaauacccuuuugaaauacaaauacuagcuggaugcagaaugaaugcaccacaaaucuucuuaaacauggcauaucaagguucagacuucuuaucauuucaaggaauaucuugggaaccuucuccaggcgcagguauacgugcucaaaacauauguaaaguacuaaacagauaucucgacauaaaagaaauacuacaaaguuuacuuggacauacaugucccagauuccuugccggacuaauggaagcaggugaaucagaauuaaaaagaaaaguaaaaccagaagcaugguuaucauguggacccaguccaggaccaggccgauuacaacuaguuugucacguaucaggauucuacccaaaaccaguauggguuauguggaugagaggagaacaagaacaacgaggcacccaaagaggagauguuuuacccaaugcagacgaaacaugguaucuaagagcuacacuagauguagcagcaggugaagcagccggccuauccugccgaguaaaacauucaucauuagggggacacgaccuaaucauacauuggggaggcuacucaauauuuuuaauacuaauaugucuaacuguaauaguaacuuuaguuauacuaguaguaguagauucaagacuaaaaaaacaaucaagcaacaaaaacauacucucaccacacaccccaucaccaguauucuuaaugggagcaaacacacaagauacaaaaaacuccagacaucaauuuugccucgcacaaguaucauggauuaaaaacagaguccuaaaaaaauggaaaacaagacuaaaccaacuuugguaa

SEQ ID NO: 3591 - RNA, 894 nt, Artificial Sequence
  AAA35581 variant
augacuaccccaagaaacucaguaaacgguacauucccagcagaaccaaugaaaggaccaauagcaaugcaaagcggaccaaaaccacucuucagaagaaugucaucacuaguaggaccaacacaaucauucuucaugcgagaauccaaaacauuaggagcaguacaaauaaugaacggccuauuccacaucgcccuaggaggauuacuaaugauacccgcagguauauacgcaccaauaugcguaacaguaugguauccucuauggggcggaauaauguacaucauaucaggaucacuacucgcagccaccgaaaaaaacagcagaaaaugcuuaguaaaaggaaaaaugauaaugaacuccuuaucccuauucgcagccauaucaggaaugauccuaucaauaauggauauacuaaacauaaaaauaucacauuuccucaaaauggaauccuuaaacuucauaagagcacacaccccauacauaaauauauacaacugcgaaccagcaaacccaucagaaaaaaacucaccauccacacaauacugcuacucaauacaaucacuauucuuaggaauacuaucaguaaugcuaauauucgccuucuuccaagaauuaguaauagcaggaauaguagaaaacgaauggaaaagaacaugcucaagaccaaaaucuaacauaguacuauuaucagccgaagaaaaaaaagaacaaaccauagaaauaaaagaagaaguaguaggauuaaccgaaaccucuucccaaccaaaaaacgaagaagauauagaaauaauaccaauacaagaagaagaagaagaagaaacagaaaccaauuucccagaaccaccacaagaccaagaaucaucaccaauagaaaacgauucaucaccauaa

SEQ ID NO: 3592 - RNA, 1989 nt, Artificial Sequence
  AAC18956 variant
auggaaucaaaaacagaaaaauggauggaacgcauucaucuaaacgucagcgagagaccauucccaccacauauacaauuaccaccagaaauacaagaaagccaagaaguuacacuaacaugucuucuaaauuucucaugcuacggcuacccaauacagcuacaaugguuacuagaagguguuccaaugagacaagcugcaguaacaucaacaucauuaacaauaaaaucaguauuuacuagauccgaauuaaaauuuaguccacaauggagccaccacggaaaaaucgucacaugccaauuacaagacgcugacggaaaauuucuuaguaaugacacaguucaauuaaauguaaaacauacuccaaaauuggaaauuaaaguaacaccaagcgaugcaauagucagagaaggugauucaguuacaaugacgugcgaaguaucaagcacaaacccugaauauacaacggucucuugguugaaagacggcacaagucuaaagaaacaaaauacuuuuacgcuaaauuuaagagaaguuacaaaagaucaaagugguaaauacuguugucaaguaucuaaugauguaggcccgggcagaagcgaagaaguguuccuacaaguucaauaugcuccagaaccaucuacaguucaaauauuacauucuccugcaguagaaggcucacaaguagaauuuuuauguaugucacuagcaaauccccuaccaacuaacuauacuugguaccauaacggaaaagaaaugcaaggaagaacagaagaaaaaguacauauaccaaaaauucuaccauggcaugcagggacauacucauguguggcagaaaauauucuaggaacuggacaaagagguccaggagcagaacucgacguccaauacccacccaagaaaguaacaaccguaauucaaaacccaaugcccauaagagaaggagauacaguaacacuaagcuguaacuacaauucuucaaauccaucaguaacaagauacgaauggaaaccacacggagcgugggaagaacccucuuugggaguacuaaaaauucaaaaaguuggaugggauaacacgacaauugccugcgccagaugcaauucauggugcucaugggcaucuccuguagcauuaaauguacaauaugcaccacgagacguuagaguaagaaaaauaaaaccacuuagugaaauacauucaggaaauucaguaucacugcaaugcgauuucaguagcagucauccaaaagaaguccaauucuuuugggagaaaaauggaagacuuuuaggaaaagaaucacaauuaaacuuugacagcauaucacccgaagacgcaggaaguuacucauguuggguaaauaauucuauaggccaaacagccucaaaagcauggacauuagaaguauuauaugcuccacgacgucuaagaguauccaugucgccaggagaccaaguaauggaagguaaaagcgcuacucuaagaugugaaagugaugcaaauccaccaguaucacacuauacaugguuugacuggaauaaucaaagucucccauaucacucacaaaaacuccguuuagaaccaguaaaaguacaacauucaggugcauauuggugccaaggaacaaacucaguaggaaaaggacgaucaccauugucaacauuaacuguauauuacucuccugaaacaauaggaagaagaguagcaguaggacuaggcucaugccuagcaaucuuaauacuagcgauaugcggguuaaaauuacaacgaagagaugcagaaucauccgaaaugcaacgaccaccacgaacaugcgaugauacagucacauacucagcacuacauaaaagacagguaggugacuaugaaaacguaauaccagauuucccugaagaugaaggaauacauuauucagaacuuauacaguuuggaguaggugaaagaccacaagcccaagaaaacguagauuacguaauauuaaaacauuga

SEQ ID NO: 3593 - RNA, 2544 nt, Artificial Sequence
  AAB06448 variant
augcaucuacucggacccuggcucuuacuauuaguucuagaauaccucgccuuuuccgacucaucuaaaugggucuuugaacacccagaaacauuauaugcaugggaaggagcaugcguauggauacccugcaccuauagagccuuagacggagacuuagagucauuuauacuuuuucauaaccccgaauauaacaaaaauacaaguaaauucgauggaacucgcuuauaugaaagcacaaaagaugguaaaguaccauccgaacagaaaagaguucaauuucuaggagauaaaaauaaaaacuguacauuaagcauucauccuguacaucucaaugauucaggacaauuaggauuacgcauggaaucaaaaacugaaaaauggauggaaagaauacaucuaaacguaucagaaagaccguuuccaccacacauucagcuaccaccagaaauccaagaaucucaagaaguuacucuaacaugucuucucaauuucucaugcuauggcuacccaauacaauuacaaugguuauuagaaggggucccuaugagacaagcagccguuacaucuaccucacuuacgauaaaaucaguauuuacacgcucugaauuaaaauucagcccucaauggucucaucacggaaaaauaguaacaugccaauugcaagaugcagacgguaaauucuuauccaacgacacaguacaacuuaauguaaaacacacaccaaaauuagaaauaaaagucacacccucagacgcuauaguaagagaaggagauucaguaaccaugaccugugaaguauccuccucaaauccggaauacacaacaguaucaugguuaaaagacggcacaagucucaaaaagcaaaauacuuucacacuaaacuuacgagaagucacaaaagaccaaucaggaaaauacugcugccaagucaguaaugacguaggaccaggacgaucagaagaaguauuucuacaaguacaguacgcaccagaaccaaguacuguacaaauauuacacagcccagcaguagaaggaagucaagucgaguucuuaugcaugucacucgcaaauccacuuccaacuaacuauacaugguaucacaacggcaaagaaaugcaaggacggacagaagaaaaaguacacaucccuaaaauacuuccuuggcaugcaggaacauacuccuguguugcagaaaacauauuaggaacgggacagagaggaccuggagcagaacuagauguucaauaucccccaaagaaaguuacgaccguuauacaaaacccuaugcccaucagagaaggagacacagucacauuaaguuguaacuauaauucaagcaauccaagcguuacuagauaugaauggaaaccacacggugcaugggaagaacccucauuaggaguacuaaaaauccaaaauguaggcugggauaacacaacaauagcaugcgcagcuugcaauuccugguguagcugggcaucaccaguagcuuuaaauguacaauaugcuccuagagauguaagaguaagaaaaauuaaaccacugucugaaauacacucaggcaauuccguuagccuucaaugugacuucucaaguagucauccuaaagaaguccaauucuucugggagaaaaauggcagacuauuaggcaaagaaucucaauuaaacuuugacucaaucuccccagaagacgcuggaaguuauucgugcuggguaaauaacucaauuggacagacagcaucuaaagcauggacuuuagaaguauuauacgcucccagaagauuacgaguuaguaugucgccuggagaucaaguaauggaaggaaaaucagcaacauuaacaugcgaaucagacgcaaacccuccaguaucucauuacacaugguuugauuggaacaaccaaucauuaccuuaccacucccagaaauugagauuagaaccagucaaaguacaacacucaggcgcauacuggugucaaggaaccaacucagucggaaaagggcgaucuccauuaaguacauuaacaguuuauuacucaccagagacuauaggacgaagaguagcugugggauuaggauccuguuuagcaaucuuaauacuagcaaucugugguuuaaaacuccaacgaagauggaaaagaacucaaucccaacaaggauuacaagaaaauucauccggucagagcuuuuucguaagaaauaagaaaguaagacgagccccacuuucagaaggaccacacucacuaggcuguuacaacccaaugauggaggacggaauaagcuacacaacauuaagguucccagaaaugaauauaccaagaacaggagaugcugaaucaagcgaaaugcaaaggccaccaccagauugugacgauacagucacuuauucagcauuacauaaaagacaaguaggagauuaugaaaauguaaucccagauuuucccgaagacgaaggaauacacuacucagaguuaauacaauuuggaguaggagaaagaccccaagcacaagaaaacgucgacuaugucauauuaaaacauuaa

SEQ ID NO: 3594 - RNA, 2544 nt, Artificial Sequence
  ABK41939 variant
augcacuuauuaggcccgugguuauuacuccugguacucgaauaucuagcauuuagugacagcaguaaauggguauucgaacauccagaaacacuauaugcaugggagggagcauguguuuggauaccauguacauauagagcuuuagauggugauuuagagagcuuuauacucuuucacaauccagaauacaauaaaaacacaucaaaauucgaugguaccagauuauaugaaucuacuaaagauggaaaaguaccaagcgaacaaaaacgcguucaauuccuuggggauaaaaacaaaaauuguaccuuaucgauucacccaguccaccucaaugauucaggacaauuaggauuaagaauggaaucaaaaacugaaaaauggauggaacguauacaucuaaacguaucagaaaggccauucccaccacacauacaacuacccccagaaauacaggaaucccaagaagucacguuaacuugcuuacuuaauuucucaugcuauggauauccaauacaacuacaauggcuccuugaaggcguuccuaugagacaagcagcaguaacaucaacuucacuaacaauaaaauccguuuucaccagaucagaacuaaaauucagcccacaauggucacaccaugguaaaauaguaacaugucaauuacaagaugcagacggaaaauuucuaucaaacgacacaguucaacuaaacguaaaacacacaccaaaacuagaaauaaaaguuacuccaucggaugcuauaguacgcgaaggugauucuguaacaaugacaugcgaaguuucuucgucuaacccagaauauacaaccgucucuugguuaaaagacggcacaagccuaaagaaacaaaauacuuuuacccucaauuuaagagaagucacaaaagaccaauccggaaaauacugcugucagguaucaaaugacguaggaccuggcagaucugaagaaguuuuucuucaaguucaauacgcaccagaacccucaacaguacaaauccuucauaguccggcaguagaaggaucucaaguagaguuccuaugcaugucucuagcaaacccauuaccaacuaauuauacaugguaccauaacgguaaagaaaugcagggaagaacggaagaaaaaguacauauaccuaaaauauuacccuggcacgcugguacauauucaugcguggcagaaaauauacuaggaacaggacaacgaggaccgggcgcagaauuagauguucaauacccuccuaagaaaguuacaacaguaauacagaaucccaugccuauucgggaaggagauacaguaacauugucuugcaauuacaacagcucaaauccgucuguaacacgauaugaauggaaaccccacggagcuugggaagaaccuucauuaggaguacuaaaaauucaaaaugucggaugggacaacaccacaauagcaugugcagcaugcaauucuuggugcuccugggcuucaccuguagcuuuaaacguacaauacgccccaagagauguacgcguaagaaaaauaaaaccauuaucagaaauccacucagguaauucugucagcuuacaaugugacuucucaagcucacacccgaaagaaguacaauucuucugggagaaaaauggacgauuauuaggcaaagaaucacaguuaaauuuugacucaauaucaccugaagaugcuggaaguuauucaugcuggguaaauaacuccauuggacaaacugcuucuaaagccuggacucuggaaguacuauaugcaccuagaagacuaagaguaagcaugucaccaggagaccagguaauggaaggaaaauccgcaacauuaacuugugaaucugaugcaaauccaccuguaucacauuacacaugguuugauuggaauaaucaaucucucccauaucauucucaaaaauuaagacuugaaccaguuaaaguacaacauucaggagcauauuggugccaagggacaaauagcguugguaaaggaagaucaccccuauccacauugacaguauauuacucaccugaaacaauaggcagaagaguagcaguaggauuaggcucaugucuagccauacucauacuagcuauauguggauuaaaacuacaaagacgauggaaaagaacacaaucccaacaaggacuccaagaaaacaguaguggccaauccuucuucguaagaaauaagaaaguaagacgagcgccauuaucagaaggaccacacucucuaggauguuacaauccaaugauggaagauggaauaucuuauacgacuuuaagauucccagaaaugaauauccccagaacuggagacgcagaaucuagcgaaaugcaacguccuccaccugauugcgaugacacuguuaccuauagcgcauuacacaaaagacaaguuggugauuaugaaaacguaauaccagacuuuccugaagacgaaggaauacacuacucagaacuaauacaauuuggagucggagaaagaccacaagcacaagaaaacguagauuauguuauacuaaaacacuag

SEQ ID NO: 3595 - RNA, 1605 nt, Artificial Sequence
  CAE47548 variant
auguugcgaagacgaggaagccccggaaugggaguucauguuggagccgcauuaggagcgcuuugguuuugccuuacuggugcucucgaaguacaaguaccagaagauccaguagucgcgcuaguagguacagaugcaacacuaugcuguucauuuaguccugaaccaggauuuucauuagcacaauuaaaccucauauggcaauuaacagauacuaaacaauuaguacauucauucgcagaaggacaagaccaaggaagcgcauaugcaaacagaacugccuuauucccagacuuauuagcacaaggaaaugcaucuuuaagauuacaaagagucagaguggcagaugaagguucauuuaccuguuuuguaucaauaagagauuuugguagugcagcuguaucauuacaaguagccgcaccauacucaaaaccgucgaugacucuagaacccaacaaagauuuacguccaggagacacaguaacaauaacauguagcucauaucaaggguauccagaagcugaaguauuuuggcaagauggacaaggaguuccauuaacaggaaauguaacaacuagccaaauggcaaaugaacaaggacuauucgacguacacagcaucuuacgaguaguuuuaggagcaaauggaacauauucauguuuaguaagaaauccaguacuucaacaagaugcgcauagcucaguuacaauaacaccacaaagaaguccuacuggagcugucgaaguacaaguuccagaagauccagucguugcuuuaguaggaacagaugcaaccuuaagauguucauucaguccagaaccaggauuuaguuuagcacagcuuaauuuaaucuggcagcuaacugacacaaaacagcuaguacauucuuucacagaaggaagagaccaaggaagugcauacgcaaacagaacugcauuauucccagaucuacuagcacaagguaaugcaaguuuaagauuacaaagaguaagaguagcagaugaaggaaguuuuacauguuuuguuagcauaagagacuucggaagugcagcaguaaguuuacaaguggcugcgccauacaguaaacccucaaugacauuagaaccaaauaaagaucuuagaccuggcgauacaguaacuauaacaugcucgaguuauagaggauaccccgaagcagaaguauucuggcaagauggacaagguguaccucuaacagguaauguuacuacaagucaaauggccaacgaacaaggacuauuugauguacauucaguauuacgaguaguauuaggagcaaacggaacauacaguugucuaguaagaaauccaguacuucaacaagacgcccauggaucugucacaauaacaggacaaccaaugacauuuccaccagaagcauuauggguuacagucgguuuaucaguauguuuaauagcacuauuaguagcacuagccuuuguuuguuggcgaaagauaaaacaauccugcgaagaagaaaaugcaggagcugaagaucaagacggcgaaggugaaggcaguaaaaccgcauuacaaccauuaaaacauagcgacaguaaagaagaugauggccaagaaauugcauaa

SEQ ID NO: 3596 - RNA, 639 nt, Artificial Sequence
  BAG57312 variant
augccacuauuacuacuauuaccauuauuaugggcagaccuaacacacagaccaaaaauauuaauaccaggaacacuagaacccggacacuccaaaaaccuaacauguucaguaucaugggcaugcgaacaaggaacaccaccaauauucucaugguuaucagcagcacccacaucacuaggaccaagaacaacacacucaucaguauuaauaauaacaccaagaccacaagaucauggcacaaaccuaacaugccaaguaaaauucgcaggagcaggaguaacaacagaaagaacaauacaacuaaacguaacauacguaccacaaaacccaacaacaggaaucuucccaggagacggaucaggaaaacaagaaacaagagcaggagucguacacggagcaauaggaggagcaggaguaacagcacuacucgcacuaugcuuaugcuuaauauucuucauaguaaaaacacacagacgaaaagcugcaagaacagcaguaggaagaaaugauacucacccaacaacaggcucagccucaccaguaucagauggagcaucauggcacccaguaugcccagcagacacaucaucacaaugcggaccaccaucaugcccaauacaacacuuccaaaauuaa

SEQ ID NO: 3597 - RNA, 1095 nt, Artificial Sequence
  AAK83654 variant
augccacucuuauuauuauuaccauuauuaugggcaggagcacuagcaauggacccaaacuuuugguuacaaguacaagaaucagucacuguccaagaaggacuaugcguacuaguaccaugcacauuuuuccauccaauaccuuacuaugacaaaaauucuccuguccauggauauugguuuagagaaggugcuauaauaucaagagauucaccaguagccacaaacaaacuagaccaagaaguacaagaagaaacacaaggacgauuccgacuauuaggugacccaucaagaaauaacuguucucuuuccauaguagaugcaagaagaagagacaacggaucauacuucuucagaauggaacgaggaucaacaaaauacucauauaaaucaccacaacuaucaguacauguaacagacuuaacccacagaccaaaaauuuuaauaccaggaacauuagaacccggucacagcaaaaaccuaacauguucaguauccugggcuugugaacaaggaacaccaccuauauuuuccuggcucucagcagcaccaacaucauuaggcccaagaacuacucauucaucaguacuaaucauaaccccacgaccacaagaccauggaacaaaccuaacuugccaaguaaaauucgcuggagcaggaguuacaacugaacgcacaauacaacuuaacguaacauauguaccacaaaauccaacaacaggaauauucccaggagacggaucaggaaaacaagaaacaagagcuggaguaguccauggagccauaggaggagccggaguaacagcauuauuagcauuaugucuaugucuaauauuuuuuauaguaaaaacacauagacgaaaagcagcaagaacagcaguaggacgaaaugacacacaucccacaaccggaucagcaaguccaaaacaccaaaaaaaaucaaaacuacauggaccaaccgaaacaucuuccugcucuggagccgcucccacaguagaaauggaugaagaacuccauuacgcauccuuaaauuuucacgguaugaacccaucaaaagauacgucuacagaauacuccgaaguucgaacacaauaa

SEQ ID NO: 3598 - RNA, 1095 nt, Artificial Sequence
  CAD36509 variant
augccacuucuacuacuacuaccauuauuaugggcaggagcauuagcaauggauccaaauuuuugguuacaaguacaagaaucaguaacaguacaagaaggauuaugcguacuagucccauguacauuuuuccauccaauucccuauuacgauaaaaacaguccagugcacggcuauugguuuagagaaggagcaauaauaucuagagauucuccaguagcaacuaacaaacuagaccaagaaguacaagaagaaacccaaggaagauucagauuacuaggagauccaucaagaaauaauuguucacucaguauaguagaugcaagaagaagagacaauggaucauauuuuuuucgaauggaacgaggaucaacuaaauauagcuauaaaucgccacaacuaucaguacauguaacagacuuaacacauagaccuaaaauauuaauaccaggaacauuagaaccaggacacuccaaaaauuuaacaugcucaguaaguugggcaugugaacaaggaacacccccuauauucagcuggcucagugcagcuccaacaucauuaggaccaagaacaacccacucaucaguccuaauaauuacaccaagaccucaagaucauggaacaaacuuaacaugccaaguaaaauucgcaggagcaggagucacuacagaaagaacaauucaauuaaacguaacuuauguaccacaaaaucccacaacaggcauauuucccggagauggaagcggaaaacaagaaacuagagcugguguuguacauggagcuauaggaggcgcuggaguaacagcauuacuagcauuaugcuuaugcuuaauauuuuucauaguaaaaacacauagaagaaaagcagcccgaacagcuguaggacgaaaugauacucauccaacaacaggcucagcaucaccaaaacaccaaaaaaaaucaaaauuacacggaccaacagaaacaucaagcugcuccggagccgcaccaacuguagaaauggaugaagaacuacacuacgcuucacuaaacuuucacggaaugaauccaucaaaagauaccaguaccgaauacucugaaguuagaacacaauaa

SEQ ID NO: 3599 - RNA, 624 nt, Artificial Sequence
  AAA52295 variant
augcaaagcggaacacauuggagaguauuaggauugugcuuacuaucaguaggaguauggggacaagauggaaaugaagaaaugggaggaauaacacagacaccauauaaaguaagcauaagcggaacaacaguaauauuaacguguccacaauauccaggaagugaaauauuauggcaacauaaugauaaaaauauagggggagaugaagaugauaaaaauauaggaagugaugaagaucauuuaaguuuaaaagaauuuagcgaauuagaacaaagcggauauuauguauguuauccaaggggaagcaaaccagaagaugcaaauuuuuauuuauauuugagagcaagaguaugugaaaauuguauggaaauggauguaaugagcguagcaacaauaguaauaguagauauauguauaacaggaggauuacuauuauuaguauauuauuggaguaaaaauagaaaagcaaaagcaaaaccaguaacaagaggagcaggagcaggaggaagacaaagaggacaaaauaaagaaagaccaccaccaguaccaaauccagauuaugaaccaauaagaaaaggacaaagagacuuauauaguggauuaaaucaaagaagaauauaa

SEQ ID NO: 3600 - RNA, 495 nt, Artificial Sequence
  AAH25703 variant
augaaauggaaagcacuauucacagcagcaauacuacaagcacaauuaccaauaacagaagcacaaagcuucggacuacuagacccaaaacuaugcuaccuauuagacggaauacuauucauauacggaguaauacuaacagcacuauuccuaagaguaaaauucucaagaucagcagacgcaccagcauaccaacaaggacaaaaccaauuauacaacgaacuaaaccuaggaagaagagaagaauacgacguauuagacaaaagaagaggaagagacccagaaaugggaggaaaaccacaaagaagaaaaaacccacaagaaggacuauacaaugaacuacaaaaagacaaaauggcagaagcauacucagaaauaggaaugaaaggagaaagaagaagaggaaaaggccacgacggccuauaccaaggacuaucaacagcaacaaaagacacauacgacgcacuacacaugcaagcacuaccaccaagauaa

SEQ ID NO: 3601 - RNA, 2229 nt, Artificial Sequence
  CCDS7897.1 variant
auggauaaauucugguggcaugcugcauggggacuauguuuagucccauuaucuuuagcacaaaucgauuuaaauauaacauguagauuugcaggaguauuccauguagagaaaaauggaagauacucaauaucgagaacagaagcagcagaucuuugcaaagcauucaauagcacacuacccacaauggcacaaauggaaaaagcacuaucuauaggcuucgaaacauguagauauggauucauagaaggacauguaguaauaccccgaauacacccgaacucaauaugugcggcaaauaacaccggcgucuacauuuuaacaucaaauacaucacaauacgauacauauugcuuuaacgcaucugcaccaccagaagaagauuguacaucaguaacagaucuuccaaaugccuuugacggaccaauuaccauaacaauuguuaauagagacggaacaagauauguucaaaaaggagaauaucgaacaaaccccgaagacauauacccuucaaacccaaccgaugaugacguaucuaguggaagcuccuccgaaagaucaucaacaucaggagguuacauauuuuacacuuuuucaacaguucauccaaucccagacgaagacucccccuggauaacagauucuacggacagaauaccagcaacaaccuuaauguccacaucugcaacugcaacugaaacugcaaccaaacgucaagaaacaugggauugguucagcuggcuauuucuaccaagugaaaguaaaaaccacuuacauaccaccacacaaauggcugguacaucaaguaauacuauaucagcagguugggaacccaaugaagaaaaugaagaugagagagacagacacuuaucauuuucugguuccggaauagacgaugaugaagacuuuaucuccucaacaauaucuaccacaccuagggcauuugaccauacaaaacaaaaccaagacuggacacaauggaauccaucacauucuaacccagaaguccuacuucaaacuacaacaagaaugacagauguagaucgaaacggcacaacagcauacgaaggaaacuggaaucccgaagcccacccacccuuaauccaucaugaacaccaugaagaagaagaaaccccacauucaacaucaacaauacaagcaacaccauccuccacuacagaagaaacugcaacacaaaaagaacaaugguucggaaacagguggcacgaaggauacagacaaacaccaaaagaagauucacauuccacaacuggaacugcagcagcaucagcccacacuucacauccuaugcaagguagaacuacaccauccccagaagauagcuccuggaccgacuucuucaacccuauaagucacccgauggguaggggccaucaagcaggaaggagaauggacauggauucaucacauucaauaacacuacaacccacagcuaacccaaauacaggacugguagaagacuuggauagaacugguccauuaucaaugacuacacagcaaucaaauagccaaaguuuuucaacaucccaugaaggccuagaggaagauaaagaccauccaacgacuucaacucucacuucuucaaacagaaacgauguaacuggagguagaagagaucccaaccacagugaaggaucaacaacauuacuagaaggauacacuucacacuacccacacaccaaagaaucuagaacuuuuauuccaguuacaagcgcuaaaacaggaucauucggcguaacagcaguaaccguaggugacucaaauagcaacgucaacagaucccuaagcggagaucaagauacauuucauccauccgguggcucucacacaacacauggaagcgaaucagacggucauucucauggaucacaagaaggaggagcaaacacuacaucuggaccaauuagaaccccacaaauaccugaaugguuaauaauauuagccucucuacucgcacuagcacugauauuagcaguaugcauagccgucaauaguagaagaagaugcgggcaaaagaaaaagcuaguaauaaacagcggaaauggggcagucgaagaucgcaaaccaucaggauuaaacggagaagcaucaaaaucacaagaaaugguccaucuaguaaauaaagaaucaucugaaacccccgaccaauuuaugacagcagacgaaaccaggaaucuacaaaacgucgauaugaaaauuggcguuuaa

SEQ ID NO: 3602 - RNA, 2100 nt, Artificial Sequence
  XM_006718388.1 variant
auggacaaauuuugguggcaugcagcuuggggccuaugucuaguuccauuaucgcuugcacaaauugaucuaaacauaaccugcagauucgccgguguauuucauguagagaaaaacggaagauauucaauuucaagaacugaagcugcagaccuauguaaagcauuuaacagcacuuugccuacaauggcacaaauggaaaaagcauuaagcauaggauuugaaacaugucgauacggauuuaucgaaggucauguaguaauacccagaauacacccaaacucaauaugugccgccaacaacacaggaguauacauacuuacuucaaauacaucacaauacgauacauauugcuuuaacgcaucugcaccaccugaagaagacuguacauccguaacagaucuaccaaaugcauuugauggcccaaucacaaucacaauaguuaauagggauggaacacgguacguacaaaaaggagaauaucgaaccaacccagaagauauauauccaucuaacccaacagaugaugacguaucaucagguucaucaucugaaagaucaagcacauccggagguuauauauuuuacacuuucucuacaguucaucccauuccagacgaagacucaccauggauaacagauucaacagaccguauucccgcaacuacacuaaugagcacauccgcuacagcaacagaaacagccacuaaacgacaagaaacaugggauugguucaguuggcuauuucuaccuucagaaagcaaaaaucaucuacauacuaccacacaaauggcaggaacuucaucuaacacaauaucugcaggaugggaaccaaaugaagaaaacgaagacgaacgugaccgccaccuaucguuuucaggaucaggaaucgaugaugacgaagauuuuauuucuucaacaauaucaacaacacccagagcauucgaccauacuaaacaaaaccaagauuggacccaauggaacccuagccacucaaacccagaaguccuacuccaaacaacuacaagaaugacugauguagacagaaacggaaccacagcauaugaagguaacuggaauccagaagcucacccaccauuaauucaccacgaacaucacgaagaagaagaaacaccacauucuacaucaacaaccgcaagcgcacauacaucucaucccaugcaaggaaggacaacaccaucccccgaagacucuagcuggacagauuucuuuaacccaauaagccacccaaugggucgcggacaucaagcaggcagacgaauggacauggacuccucacacucaauaacuuuacaaccuacagcaaauccaaacaccggccuaguugaagaccuagaucgaacaggaccacuuucaaugaccacucaacaaucuaacucucaauccuuuucaacaucacacgaaggacuagaagaagacaaagaucauccaacaacaucuacauugacuucaucaaaccggaacgauguuaccggagggcgaagagauccaaaccauagugaaggaucaacaacauuacuagaaggauacacaucacauuauccacauacuaaagaaucacgaacauucaucccaguaaccucagcaaaaaccggcucauuuggaguaacagcaguaacaguaggugacucaaacucaaacgucaauagaucacucuccggagaccaagacacauuccauccuucaggaggcucucacacaacccauggaucugaauccgacggacacucacacggaagccaagaaggcggagcaaauacaacauccggaccuauuaggacuccacagauaccggaauggcuaauuauauuagcaagucucuuagcacuagcccucauccuagcuguaugcauagcaguuaauucaagaagaagauguggacagaaaaagaagcuaguaauaaacucaggaaauggagcaguagaagaccggaaaccaucaggucuaaacggagaggcuucaaaaagucaagaaaugguacauuuagucaauaaagaaagcucagaaacaccugaucaauucaugacagccgacgaaacaagaaaccuccaaaacguagacaugaaaauaggaguuuaa

SEQ ID NO: 3603 - RNA, 1377 nt, Artificial Sequence
  AAA35572 variant
augaacagaggaguaccauuccgccaccuucuacuaguauuacaacuagcacuauuaccagccgccacacaaggaaaaaaaguaguacuaggcaaaaaaggcgacacaguagaauuaacaugcacagcaucccaaaaaaaaucuauccaauuccacuggaaaaacucaaaucaaauaaaaauauuaggcaaucaagguucuuuucuaacaaaaggaccaucaaaacuuaaugaccgagcagauagcagacgaucacuaugggaucaaggaaauuucccauuaauaaucaaaaacuuaaaaauagaagauuccgauacauacauaugcgaaguagaagaucaaaaagaagaaguacaacuauuaguauuuggauuaacagcaaacucagacacacacuuacuacaaggucaaucucuaacacuaacacuagaaucaccaccgggaucauccccauccguucaaugccgaucaccaagaggcaaaaacauacaaggaggaaaaacacuaaguguaagccaacuagaacuucaagacucaggaacauggacuuguacaguauuacaaaaccaaaaaaaaguagaauuuaaaauagacaucguaguacuugcauuucaaaaagcaucaucuaucguauacaagaaagaaggagaacaaguugaauucuccuucccauuagcauuuacaguagaaaaacuaaccggcucuggagaguuaugguggcaggcagaaagagcaucaucaucaaaaucauggaucacauucgauuuaaaaaacaaagaaguauccgucaaaagagucacacaagacccaaaauuacaaaugggcaaaaagcuaccacuacaccuaacucuaccacaagcucuaccacaauacgcaggaucaggcaaucuaacgcuagcacuagaagcuaaaacaggaaaacuccaucaagaaguaaacuuaguaguaaugcgcgcaacacaacuccaaaaaaaccuaacaugugaagucuggggcccuacaucaccaaaacuaaugcuaucucuaaaacuagaaaauaaagaagcaaaaguuucaaaaagagaaaaagcaguauggguacuaaaucccgaagcaggaauguggcaaugucuccucucagacucaggacaaguauuacuagaaucaaacaucaaagugcucccaacaugguccacaccaguacaacccauggcccuaauaguacuagguggagucgccggauuacuacuauuuauaggucuuggaaucuucuucugcguaagaugcagacauagaagaaggcaagcugaaagaaugucccaaaucaaacgacuacuauccgaaaaaaaaacaugucaaugcccacacagauuucaaaaaacaugcaguccaauauaa

SEQ ID NO: 3604 - RNA, 186 nt, Artificial Sequence
  CAA44323 variant
augaaaagauuucuauuucuacuucuaacuauaucucuacuuguaaugguacaaauacaaacaggucuaucuggacaaaacgauacaucucaaacuucaucuccaucugcaucuucaaauauaucuggagguauauuucuauuuuucguugcaaaugcaauuauacaucuauuuugcuuuucauaa

SEQ ID NO: 3605 - RNA, 186 nt, Artificial Sequence
  AAP35780 variant
augaaaagauuucuauuucuacuucuaacuauaucucuacuuguaaugguacaaauacaaacaggucuaucuggacaaaacgauacaucucaaacuucaucuccaucugcaucuucaucuaugucuggagguauauuucuauuuuucguugcaaaugcaauuauacaucuauuuugcuuuucauaa

SEQ ID NO: 3606 - RNA, 186 nt, Artificial Sequence; identical to SEQ ID NO: 3604
  ACS44650 variant

SEQ ID NO: 3607 - RNA, 954 nt, Artificial Sequence
  EAW93489 variant
augacaguagcaagaccaucaguaccagcagcacuaccacuacuaggagaauuaccaagacuucucuuacuaguccuacuaugccuacccgcagucuggggagacugcggacuaccuccagauguaccaaacgcccaaccagccuuagaaggaagaacuucauucccagaagacacagucauaacauacaaaugcgaagaaucauuugucaaaauaccaggagaaaaagauucaguaauaugccuaaaaggcucccaauggucagauauagaagaauucuguaaccaaaaaaguugccccaauccaggcgaaauaagaaacggacaaauagacgucccaggcggaauauuauuuggagcaacaauaucauucucaugcaauacaggauacaaacucuucggaagcacaucaucauucugcuuaauauccggaucaagcguacaauggucagacccacuaccagaaugccgagaaauauacugucccgcacccccacaaauagacaacggaauaauccaaggagaaagagaccauuauggauaccgacaaucaguuaccuaugcaugcaacaaaggauucacaaugauaggcgaacacucaauauacugcacaguuaacaaugacgaaggagaauggucaggaccaccaccagaaugccgcggaaaaucacuaacaucaaaaguaccuccaaccguccaaaaaccaaccaccguaaacguaccaacaaccgaaguuucaccaacaucacaaaaaacaacaacaaaaacaacaacaccaaaugcacaagcaacaagaucaacaccaguaucaagaacuacaaaacacuuccacgaaacaacaccaaacaaagguucuggcacuacaucaggaacaacaagacuacuaucaggacacacaugcuucacacuaacuggauuauuaggaacacuaguaacuaugggauuacuaacauaa

SEQ ID NO: 3608 - RNA, 882 nt, Artificial Sequence
  EAW93497 variant
augaucggagaacacucaauauauugcacaguuaacaacgaugaaggcgaaugguccggaccaccaccagaaugcagaggaaaaucacuaacaucaaaaguaccaccaacaguacaaaaaccaacaacaguuaacgucccaacaacagaaguaucaccaacaucacaaaaaacaacaacuaaaacaacaacaccaaaugcacaaggaacagaaacaccaucaguacuacaaaaacacacaacagaaaacgucucagccacaagaacaccaccaacaccacaaaaaccaaccacaguaaauguaccagcaaccauaguaaccccaacaccacaaaaacccacaacaauaaacguaccagccaccggaguuucaucaacaccccaaagacacacaauaguaaacguauccgcaacuggaacacuaccaacacuacaaaaaccaacuagagcaaacgauuccgcaacaaaaucaccugcagccgcacaaacaucauucaucuccaaaacccucucaacaaaaacaccaucagcagcccaaaacccaaugaugacaaacgcaagcgccacacaagccacacuaacagcacaaaaauucaccacagccaaaguagcauucacccaaucaccaucugcagcaagaaaaucaaccaauguacacucaccaguaacaaacggacucaaaucaacacaacgauucccaucagcccacaucacagcaacaagauccacacccguaucacgcacaacaaaacacuuccacgaaacaacaccaaacaaaggaucaggaacaacaucuggcacaacaagacuacuuucaggacacacaugcuucacacuaacaggucuacuaggaacauuaguaacaaugggacuacuaacauaa

SEQ ID NO: 3609 - RNA, 804 nt, Artificial Sequence
  EAW93493 variant
augauaggagaacacuccauauacugcacaguaaacaacgacgaaggagaaugguccggaccaccaccagaaugcagaggaaaaucacuaacauccaaaguaccacccacaguacaaaaaccaacaacaguaaacguaccuacaacagaaguaucaccaacaucacaaaaaacaacaacaaaaacaacaacaccaaacgcacaaggaacagaaacaccaucaguacuacaaaaacauacuacagaaaacguaucagcaacacgaacaccaccaacaccucaaaaacccacaacagucaacguaccagcaacaauagucacaccaacaccacaaaaaccaacaacaauaaacguaccagcaacaggaguaucaucaacaccacaaagacacacaaucguaaacguaucagcaacaggaacauuaccaacauuacaaaaaccaacaagagcaaacgauuccgccacaaaaucuccagccgcagcacaaacaucauucaucucaaaaacacuaucaacaaaaacaccaucagcagcacaaaacccaaugaugaccaacgcauccgcaacccaagccacacucacugcccaaaaauucacaacagcuaaaguagcauucacacaaucaccaucagcagccccaaccagauccacaccaguaucacgcaccacaaaacacuuccacgaaaccacaccuaacaaaggauccggaacaacaucaggaacaacacgauuacuaucaggacacacaugcuucacacucacaggauuacuaggaacccucguaacaaugggccuacuaacauaa

SEQ ID NO: 3610 - RNA, 1146 nt, Artificial Sequence
  AAA52168 variant
augacaguagcaagaccauccguaccagcagcccuaccauuacuaggagaacuaccaagauuacuauuacucguacuacuaugccuaccagcaguuuggggagacugcggucuaccaccugacguaccaaacgcacaaccagcucuagaaggaagaacaucauucccagaagacacagucauaaccuacaaaugcgaagaaucauucguaaaaauaccuggagaaaaagacucaguaauaugucuaaaaggaucacaauggucagauauagaagaauucugcaacagaagcugcgaaguaccaacaagacuaaacucagcauccuuaaaacaaccauacauaacucaaaacuacuucccaguaggaacaguaguagaauacgaauguagaccaggauacagacgugaaccaucccuaucacccaaauuaaccugucuacaaaacuuaaaauggucuacugcaguagaauucugcaaaaaaaaaucaugccccaacccaggagaaauaagaaacggacaaauagauguaccaggaggaauccuauucggagccaccauaucauuuucaugcaacaccggauacaaacuauucggaucuaccucaucauucugccuaauaucaggaaguucaguccaauggucagacccauuaccagaaugcagagagauauacugcccagcaccaccucaaaucgauaacggaauaauccaaggagaacgagaucacuacggauaucgacaaucagucacuuaugcaugcaacaaaggauuuacaaugauaggagaacacucaauauauugcaccgucaacaacgacgaaggcgaauggagcggaccaccaccagaauguagagguaaaucacugacaucaaaaguaccacccacaguacaaaaaccaacaaccguaaacguaccaacaacagaaguaucaccaacaucacaaaaaacuacaacaaaaacaacuacuccaaacgcacaagccacaagauccacaccaguuucccguacaacaaaacacuuccaugaaacaacaccaaacaaaggaucaggaacaacaucuggaacaacacgacuacuuagcggccauacaugcuucacacuaacaggacuauuaggaacauuaguaacaaugggacuacuuacuuaa

SEQ ID NO: 3611 - RNA, 2577 nt, Artificial Sequence
  CCDS73385.1 variant
augcuacaaacaaaagauuuaauauggacauuauucuuccuagguacagcagucucccuacaagucgauauaguaccgagucaaggugaaauaaguguuggcgaaaguaaauuuuuccuaugucaaguagcaggcgacgcaaaagauaaagauauaucaugguucucgccaaacggagaaaaacuaacaccaaaucaacagcgaauuucaguuguauggaaugacgacucuucaucaacacuaaccaucuauaaugccaauauagacgaugcuggcauauacaaauguguaguaacaggagaagauggaucagaaagcgaagcaacaguaaauguaaaaauauuucaaaaacuuauguuuaagaaugcgcccacaccacaagaauuucgagaaggagaagacgcaguaauaguaugcgauguaguaucgucuuuaccaccuacaauaaucuggaaacauaaaggacgagacguuauacuaaagaaagaugucagauucauaguacuaucaaacaauuauuuacaaauaagaggaauaaagaaaacugaugaagguacauacagaugugaaggaaggauauuagcgcgaggagaaauuaacuuuaaagauauacaagucauaguaaaugucccaccaacaauacaagcuagacaaaauauuguaaacgcaacagcaaaccuaggacaaucgguuacauuaguaugugaugcagaaggauucccagaacccacuaugucguggaccaaagacggagaacaaaucgaacaagaagaggacgacgaaaaauauauauuuagugaugacucaagucaauuaacaauaaagaaaguugacaaaaacgaugaagccgaauacauuuguauugcagaaaauaaagcaggagaacaagacgcaacaauccauuuaaaaguauuugcaaaaccuaaaauaacuuacguagaaaaucaaacagcuauggaacuagaggaacaaguaacuuuaacaugcgaagcaagcggcgaucccauaccaaguauaacauggagaacaaguacgagaaacaucaguuccgaggaaaaagccaguuggaccagaccggaaaaacaagaaacuuuagauggccauauggucguaaggagucaugcuagagucucaagccucacacuaaaaagcauacaauacacugaugcgggagaauauauauguacagcaagcaauacgauaggacaagacucccaaaguauguauuuagaaguacaauaugcaccuaaauuacaaggaccgguggccgucuauacaugggaagguaaccagguuaauauaacuugugaaguguucgcauauccaagugcaacaauaucaugguuucgagauggucaacuacuaccgucaucaaacuauucaaauauaaaaauauauaacacuccaagcgcauccuauuuagaaguuacucccgacagugaaaaugauuucggaaauuacaauuguacugcuguuaacagaauaggacaagaauccuuagaauuuauacuuguacaagccgacacuccaagcagccccaguauugaccaaguagaaccguauaguagcacugcacaaguccaauuugaugaaccagaagccacaggugggguuccaauacucaaauauaaagccgaauggagggcaguuggugaagaagucuggcauucuaaaugguaugaugcgaaagaagcaaguauggaaggaauaguuacaauagucgguuuaaaaccagaaacaacauaugcaguaagauuagcagcauuaaacggcaaaggacuaggcgaaauauccgccgcaagcgaguuuaaaacacaaccaguacaaggagaaccaucagcgcccaaacuugaaggacaaaugggagaagauggaaacucaauaaaaguaaaccuaaucaaacaagaugacggcgguucaccuauaagacauuaucugguaagauaucgggcgcuaucgagugaauggaaaccagaaauacgguuaccuucaggcagcgaucaugugaugcuaaaaucacuagacuggaacgcagaauaugaaguauaugugguagcagaaaaccaacaaggaaaaaguaaagcagcccauuucguguuccgaacaagugcacaaccuacagcaauaccagccaacgguagcccaacaucagguuuaucaacaggugcaauaguagggauauuaaucgucauuuuuguauuacuacugguaguaguagauauaaccuguuauuuccuaaauaaauguggguuauuuauguguauugcaguuaauuuaugcgguaaagcagguccaggagcuaaaggcaaagacauggaagagggaaaagcagcauuuaguaaagaugaaaguaaggaaccaauuguagaaguuagaaccgaagaagaaagaacucccaaccacgacggaggaaagcauacagaaccaaacgagacuacuccauuaacagaaccagaaaaaggaccaguggaagcuaaaccagaaugucaagaaacugaaaccaaaccagcuccugcagagguaaaaacagugccaaaugaugcaacacaaacaaaggagaaugaaucaaaagcauag

SEQ ID NO: 3612 - RNA, 867 nt, Artificial Sequence
  ABK41933 variant
augggacacacaagaagacaaggaacaagcccaucaaaaugcccauaccuaaacuucuuucaacuacuaguauuagcaggacuaucacacuucugcucaggaguaauacacguaacaaaagaaguaaaagaagucgcaacacuaucaugcggacacaacguaucaguugaagaacuagcccaaacacgaauauacuggcaaaaagaaaaaaaaaugguacuuacaaugauguccggcgacaugaacauauggccagaauacaaaaaccgcacaaucuuugacauaacaaacaaucuaucaauaguaauacuagcauuaagacccuccgacgaaggcacauacgaaugcgucguacucaaauacgaaaaagacgcauucaaaagagaacacuuagcagaaguaacccuaucaguaaaagcagauuuccccacucccucuauaucagacuucgaaaucccuacaucaaacauacgaagaauaauauguucaacaucaggaggauucccagaaccacauuuauccuggcuugaaaacggagaagaauuaaacgcaauaaacacaacaguaucacaagacccagaaacagaacuuuacgcaguaucauccaaacuagacuuuaacaugacaacaaaccauucauucaugugucuaauaaaauacggacaucuaagaguaaaccaaacauucaacuggaacacaacaaaacaagaacauuucccagacaaucuacuaccaucaugggcuauaacauuaauaucaguaaacggaaucuucguaauaugcugucuaacauacugcuuugcaccaagaugcagagaaagaagaagaaacgaaagacuaagaagagaaagcguacgaccaguauaa

SEQ ID NO: 3613 - RNA, 867 nt, Artificial Sequence
  AAA36045 variant
augggacacacaagaagacaaggaacaagcccaaguaaaugcccauacuuaaacuucuuccaacuacuaguacuagccggacuaucacauuucugcuccggaguaauacacguaacuaaagaaguaaaagaaguagccacacuaucauguggacacaauguaucaguagaagaacuagcacaaacaagaauauauuggcaaaaagaaaaaaaaaugguacuaaccaugaugucaggagacaugaacauauggccagaauacaaaaacagaacaaucuucgacauaacaaacaauuuaucaauaguaauacuagcacuaagaccuucagaugaaggaacauacgaaugcguaguacucaaauaugaaaaagaugcauucaaaagagaacaccuugccgaaguaacacucucaguaaaagcagacuucccaacaccaucuauaagugacuuugaaauaccaacaucaaauauaagaagaauaaucugcucaacaucaggaggauucccagaaccacaucuaucauggcuagaaaacggcgaagaacuaaacgcaauaaacacaacaguaagccaagacccagaaacagaacuauacgcaguaaguucaaaacuagacuucaauaugaccacaaaccacucauucaugugccuaauaaaauacggacaucuaagaguaaaucaaaccuuuaauuggaacacaacaaaacaagaacacuuucccgacaacuuacuaccaucaugggcaauaacacuaauaucaguaaauggcauauucguaauaugcugccuaacuuauugcuucgcaccaagaugucgagaaagaagaagaaacgaaagacuaagaagagaaagcguacgcccaguuuaa

SEQ ID NO: 3614 - RNA, 990 nt, Artificial Sequence
  CCDS3009.1 variant
auggacccucaaugcacaaugggccuaucaaacauacuauucguaauggcauucuuacuaucaggagcagcaccacucaaaauacaagccuauuucaacgaaacagcagaccuaccaugccaauucgcaaacucacaaaaucaaucauuaagcgaacuaguaguauucuggcaagaccaagaaaacuuaguccuaaacgaagucuacuuaggaaaagaaaaauucgacucaguacacucaaaauacaugggaagaacaucauuugacagcgauagcuggacacuaagauuacacaacuuacaaauaaaagauaaaggacuauaucaaugcauaauacaccacaaaaaaccaacaggaaugauacgaauacaccaaaugaacagugaacucucaguauuagcaaacuucucacaaccagaaauagucccaauauccaauauaacugaaaacgucuacauaaaccuaacaugcagcucaauccacggauacccagaaccaaaaaaaaugaguguacuauuaagaacaaaaaacagcacaauagaauacgacggaguaaugcaaaaaucccaagacaacguaacagaacuauacgacguaaguauaucacuaagcguaucauuccccgauguaacaucaaacaugacaauauucuguauacuugaaacagauaaaacaagauuacuauccucaccauucucuauagaacuagaagacccacaaccaccaccagaccacauacccuggauaacagcagucuuaccaaccguaaucauaugcgucauggucuuuugccuaauacuauggaaauggaaaaaaaaaaaaagacccagaaauucauacaaaugcggaacaaacaccauggaacgagaagaaucagaacaaacaaaaaaacgagaaaaaauucauauaccagaaagaucagacgaagcacaacgaguauucaaaucaucaaaaaccuccucaugcgacaaaucagacacaugcuucuaa

SEQ ID NO: 3615 - RNA, 708 nt, Artificial Sequence
  AAA59674 variant
auggcacucccuguaaccgcacuccuauuaccacuagcauuacuacuacacgcagcacgaccaucacaauuuagaguaucaccauuagauagaacuuggaauuuaggagaaacaguagaauuaaaaugccaaguauuacuaucaaacccaacaucaggaugcucauggcuauuucaacccagaggcgcagcagcaucaccaacauuccuacuauaccuaucacaaaauaaaccaaaagcagcugaaggacuagacacacaaagauucucaggaaaaagauuaggagauacauucguauuaacacuaucagacuucagacgagaaaacgaaggauauuacuuuugcucugcacuaucaaacucaauaauguacuucucacauuucguaccuguauuccuaccagcaaaaccaacaacaacaccagcaccacgaccaccaacaccagcaccaacuauugcaucacaaccauuaucucuaagaccagaagcaugcagaccagcagcaggaggagcaguccacacaagaggacuagacuucgcaugcgauauauauauaugggcaccauuagcaggaacaugcggaguauuacuauuaucauuaguaauaacacuauacugcaaucauagaaauagaagaagaguaugcaaauguccacgaccaguaguaaaauccggagauaaaccuucauuaucagcaagauacguauaa

SEQ ID NO: 3616 - RNA, 2472 nt, Artificial Sequence
  EAW57688 variant
augacaguucuucaagaaccaguacaagccgcgaucuggcaagcuuuaaaccacuacgcauacagagacgcaguauuucucgcugaaagacuauacgcugaaguacauucagaagaagccuuauuccuacucgccacaugcuacuaucgaucuggcaaagccuauaaagcauacagacuuuuaaaaggccacuccuguacaacaccgcaaugcaaguacuuauuagcgaaaugcugcgucgauuuaucuaaacuagccgaaggagaacaaaucuugaguggaggagucuucaacaaacaaaaaucacaugaugacauaguaaccgaauucggagacucagccugcuuuacacuaucacuacuuggacauguuuacugcaaaacagacagauuagccaaaggaucagaaugcuaccaaaaaaguuuaucacuaaauccauuuuuauggucuccauucgaaucacuuugugaaauuggcgaaaaaccugacccagaccaaacauucaaauuuacaucccuacaaaacuucagcaacugucuaccuaacuccugcacaacacaaguaccaaaccauagcuuaucacacagacaacccgaaaccguacuaacagaaacaccccaagacacaaucgaacuuaaccgguuaaacuuagaaucuucgaacucuaaauacuccuuaaacacagauucaucaguaucauacauagauucagcaguuauuuccccugauacaguuccauuaggcaccggaacaucuauccuuaguaaacaaguccaaaauaaacccaaaacaggaagaucacugcucggagggccugcagcauugucgccauuaacaccaucauuuggaauccuaccuuuagaaacucccagcccaggugacggauccuaccuucaaaauuacacuaacacaccaccagugauagauguaccaucaacuggagcaccaucaaaaaaauccgucgcacggauaggucaaacugguacaaaaaguguauucagccaaucaggaaacucacgagaaguuacucccauauuagcacaaacacaaagcagcggaccacaaacaucaacaacuccacagguacuuucaccuacaauaaccuccccuccaaacgcucucccccgacgaucuaguagacucuuuacaagugauucaucaacaacuaaagaaaauucaaaaaaacuaaaaaugaaauuccccccaaaaauaccaaaucgaaaaaccaagaguaaaaccaacaaaggcgguaucacccaaccaaacauaaacgacucacuagaaaucaccaaacuagauucaucaaucauuuccgagggcaaaaucagcacaauaacaccacaaauucaagcauuuaaccuacaaaaagcugcagcaggucuaaugucauuacuaagagaaaugggcaaaggauacuuagcccuauguagcuauaauugcaaagaagcaauaaauauacucucacaccucccuucacaucauuauaacacuggcuggguauuaugucaaauaggaagagccuauuuugaauuaagcgaauauaugcaagccgaacgaaucuuuucugaaguccgacgcauagaaaacuaucguguagaagguauggaaaucuauucaaccacacucuggcaccuacaaaaagacguagcuuuaucuguauuauccaaagaucuaacugauauggacaaaaacaguccagaagcauggugugcagcgggaaacugcuucaguuuacagagagaacacgauauagcaauaaaauucuuucaaagagcaauacaagucgauccuaacuacgcauacgcauauacacuucuuggucacgaauuuguacuuaccgaagaacuagauaaagcauuagccuguuuccgcaaugcgaucagaguaaacccaagacauuacaacgcaugguacggacuagggaugauuuacuacaaacaagaaaaauucucauuagcggaaaugcacuuccagaaggcuuuagauaucaacccacaaucauccguacuauuaugucacauuggcguaguccaacacgcacuaaaaaaaagcgaaaaagcucuugacacccugaacaaagcaauaguaauagacccaaaaaacccccugugcaaauuccaccgugcauccgugcuuuucgcaaacgaaaaauauaaaucagcauuacaagaauuagaagaacuaaaacaaauaguaccaaaagaaaguuuaguguauuucuuaauuggcaaaguuuacaaaaaacucggucagacacaucuugccuuaaugaauuucucaugggccauggaccuagacccaaaaggugcgaacaaccaaauaaaagaagcaaucgauaaaagauaucuaccagaugacgaagaacccauaacacaagaagaacaaaucaugggaacagacgaaagccaagaaucuuccaugacagacgcagaugauacacaacuacaugccgcugaaucagaugaauuuuaa

SEQ ID NO: 3617 - RNA, 2475 nt, Artificial Sequence
  AAB34378 variant
augaccguacuacaagaacccguacaagcagcaauauggcaagcucuaaaucauuacgccuauagagacgcuguuuuccuugcugaaagacuuuacgcugaaguucacucugaggaagcauuauuccuauuagcaacuugcuacuauagauccggaaaagcauauaaagccuauagacuacuuaaaggccacucaugcacuacaccucaauguaaauaucuacuagccaaauguuguguagauuuaucaaaacuugcagaaggugaacaaauacucucaggagguguauuuaacaaacaaaaaagccacgaugacauagucaccgaauucggcgacucugcauguuucacucucucacuccuaggacaugucuacugcaaaacagacagauuagcaaaaggcagugaaugcuaccaaaaaucacuaucccuaaaccccuucuuauggucccccuuugaaucuuuaugcgaaaucggugaaaaaccagauccagaccaaaccuuuaaauucaccucucuacaaaacuuuucuaauugccuuccaaacucaugcacuacccaaguaccuaaccauucauuaagucauagacaaccagaaacaguauuaacugaaacaccacaagacacuauugaauuaaaucgacuaaaccuugaaucaaguaauucuaaauacucucuaaauacugauucaucaguuucauacauagauucggcagucauauccccagauacuguuccauuaggaacaggaacaucaauacuaucaaaacaagugcaaaauaaacccaaaacaggacgaucacuauuaggcggaccagcagcacuaagcccacuuacacccucauucggaaucuugccacuagaaacaccaucucccggagauggaucauaucuacaaaauuacacaaacacuccucccguaaucgauguaccuucaacaggugccccaucuaaaaaaagugucgcacgcauaggacaaacaggaacaaaaagcguauuuucacaaucaggaaauucacgcgaaguaacuccaauacuagcccaaacccaaucuagugguccacaaacauccacaacaccacaaguccucucuccuacuaucacuucaccaccaaacgccuuacccagacgaucaucucgacuauucacuucugacucgucgacaaccaaagaaaacucaaaaaagcuaaaaaugaaauuuccaccaaaaaucccaaacaggaaaacaaaaucaaaaacuaauaaaggaggaaucacucaaccuaacauuaacgacagcuuggagauaaccaaauuagauagcagcaucaucucagaagguaaaauuucuacuauaacaccacaaauacaagcauucaaccuucaaaaagcugcagccgaaggucuaaugucacuuuugcgugaaaugggaaaagguuaucucgcauuauguucauauaacuguaaagaagccauaaacauauuaucccaucuacccucacaccauuauaacaccggauggguucuaugucaaaucggacgugccuacuuugaacuauccgaauacaugcaagcagaacgaauauucuccgaaguacgaaggauagaaaacuaucgagucgaagguauggaaauauauagcaccacuuuauggcaccuacaaaaagacgucgcacucucagucuuauccaaagauuuaacagacauggacaaaaauucaccagaagcauggugcgccgccgguaauuguuuuagccuacaaagggaacaugacaucgccauuaaauucuuucaacgugcaauacaaguugauccaaacuacgccuacgcauauacacugcuaggccacgaauuuguccuaacagaagaauuagacaaagcacuagccugcuuccguaacgcaauacgcgucaacccacgccauuauaacgccugguauggacuaggaaugauuuacuauaaacaagaaaaauuuucuuuagcugaaaugcauuuucaaaaagcucuagauauaaacccgcaauccagcguauuauuaugucauauaggaguaguccaacaugcacuaaaaaaaucagaaaaagcucucgacacccugaacaaagcuauaguaauagaccccaaaaacccacuaugcaaauuccauagagcuaguguauuauucgccaaugaaaaauacaaaucagcccuacaagagcucgaagaacucaaacaaauaguccccaaagaaucauuagucuauuuccuaauaggaaaaguuuauaaaaaacuagggcaaacacacuuagcccuaaugaauuuuucaugggcaauggauuuggaucccaaaggcgcuaacaaucaaauuaaagaagccauagauaaacgauacuuacccgaugaugaagaaccuauaacucaagaagaacaaaucaugggcacagacgaaucacaagaaucuuccaugacugacgcagaugacacacaauuacaugcagcagaaucugacgaauuuuaa

SEQ ID NO: 3618 - RNA, 1788 nt, Artificial Sequence
  AAA51947 variant
augagaguacuccuagccgcauuaggauuacucuucuuaggagcuuuaagagcauuuccacaagacagaccuuuugaagauacaugucauggaaauccaucacauuauuaugauaaagcaguucguagauguuguuauagaugucccaugggcuuauuuccuacacaacaauguccacaaagacccacugacugcagaaaacaaugugaaccagacuacuauuuagacgaagcagauagauguaccgcaugugucacauguucaagagacgaucuaguagaaaaaacaccaugugcauggaauuccucacgaguaugcgaaugucgaccaggaauguuuuguucuacauccgcuguaaacucaugugcacgcugcuuuuuucacucuguaugcccagcagguaugauaguaaaauuuccaggcacugcacaaaaaaacaccguaugugaaccagcaucuccugguguaucuccagccugugcuucacccgaaaauuguaaagaaccaagcaguggaacuauaccacaagcaaaaccaaccccaguaucacccgcaacaucaagugccucaacuaugccaguaagaggaggaaccagauuagcucaagaagcagcuucaaaacuuacaagagcuccugauuccccuucaucaguaggacgaccaaguucagauccagguuuaucaccaacccaaccauguccagaaggaucaggagauuguagaaaacaaugcgagccagacuacuaucucgaugaagcagguagauguacugcauguguaucuugcucaagggaugauuuaguagaaaaaacaccaugugccuggaauuccucaagaacaugcgaauguagaccaggaaugauaugugcaacaucugccacuaacucaugugcacgauguguaccauaucccauuugcgcagcagaaaccgucacaaaaccacaagauauggcagaaaaagauacaacuuuugaagcaccaccacuagguacacaaccugauugcaaucccacaccggaaaacggagaagccccagcaucaacaucuccuacacaaucauuacuuguagacucacaagcuucaaaaacuuuacccauaccaacauccgcccccguagcgcuaaguucuacugguaaaccgguacuagaugcaggaccagucuuauuuuggguuauuuuaguauuaguagucguagucggauccucagcauuucucuuaugucaccgaagggccugccgaaaaagaauuagacaaaaauuacauuuauguuacccaguucaaacuagucaaccuaaauuagaauuagucgauucaagaccuagacgcucauccacccaauuaagaucuggagcuucugucacagaaccaguugcugaagaaagaggacuaaugucacaaccucuuauggaaacuugucauucaguaggagcagcauauuuagaaucacuuccucuucaagacgcuuccccagcagguggacccucuuccccccgcgacuuaccagaaccccgagucucaacagaacauacaaauaauaaaauagaaaaaauauacauuaugaaagcagauacaguaauaguaggaacaguuaaagccgaauuacccgaaggaagaggauuagcaggaccagcagaaccagaauuggaagaagaacuagaagcagaccacacaccucacuauccugaacaagaaacugaaccuccucuaggaucaugcucagacguaaugcuaucaguagaggaagaagguaaagaagacccauuaccgacagcagcaucagguaaauaa

SEQ ID NO: 3619 - RNA, 912 nt, Artificial Sequence
  EAW97060 variant
auggcgacaucaagguaugaaccaguagcagaaauaggcgucggagccuauggaacagucuauaaagcaagagacccacauucaggacacuuuguagcacugaaaucuguaagaguaccaaauggaggaggaggagguggaggacuaccaaucagcacaguaagagaaguagcauuauuaagaagauuagaagcauuugaacauccaaauguaguaagauuaauggacguaugcgcaacaucaagaacagauagagaaauaaaaguaacauuaguauuugaacauguagaucaagaucuaagaacauacuuagacaaagcuccaccaccaggauuaccagcagaaacaauaaaagaucuuaugagacaauuuuuaagaggacuagacuuuuuacacgcaaauuguauaguucacagagaucuaaaaccagaaaauauauuaguuacaucaggaggaacaguaaaacuagcagauuuuggauuagcaagaauauauucauaucaaauggcauuaacuccaguaguaguaacauuaugguauagagcaccagaaguauuauuacaaucaacauaugcgacaccaguugacaugugguccguaggauguauauuugcagaaauguucagaagaaaaccacuauuuuguggaaauucagaagcagaccaauuaggaaaaauauucgauuuaauaggacuuccaccagaagaugauuggccaagagauguaagccuaccaagaggagcauuuccaccaaggggaccaagaccaguacaaucuguaguaccagaaauggaagaaucaggagcacaacuauuauuagaaauguuaacauuuaauccacauaaaagaauaucagcauucagagcacuccaacauaguuauuuacauaaagaugaaggaaauccagaauaa

SEQ ID NO: 3620 - RNA, 912 nt, Artificial Sequence
  AAA35673 variant
auggcaaccucaagauaugaaccaguagcagaaauaggaguaggagcauauggaacuguauauaaagcaagagauccacacaguggacauuucguagcuuuaaaaucagugaggguuccaaaugguggaggaggaggaggaggauuaccaauaucaacuguuagagaaguagcauuacuaagaagauuagaagcauuugaacauccaaauguaguaagacuaauggauguaugugcaacaagccgaacagacagagaaauaaaaguaacucuaguauuugaacauguagaucaagauuuaagaacauauuuagauaaagcaccaccaccaggacucccagcugaaacaauaaaagauuuaaugagacaauuuuuaagaggauuagacuuuuuacaugcaaauuguauaguacauagagauuuaaaaccagaaaauauauuaguaacuucaggaggaacagucaaauuagcagacuuuggauuagcaagaauauauucauaucaaauggcauuaacuccaguaguaguaacuuuaugguauagagcaccagaaguauuauuacaaucaaccuaugcaacuccaguagauauguggucaguaggauguauauucgcggaaauguucagaagaaaaccacuauuuuguggcaauagugaagcugaucaauuaggaaaaauauuugauuuaauaggacucccaccagaagaugacuggccaagagauguaucauuaccaagaggagcauuuccaccaagaggaccacgaccaguacaaucaguaguuccagaaauggaagaaucuggagcacaauuacuacuagaaauguuaacauuuaauccacauaaaagaauaucagcauuuagagcauuacaacauucauauuuacauaaagaugaaggaaauccagaauaa

SEQ ID NO: 3621 - RNA, 690 nt, Artificial Sequence
  AAB50213 variant
auggacgucugcgcaacaagcagaacagauagagaaauaaaaguaacauuagucuucgaacacguagaccaagaccuaagaacauaccuagacaaagcacccccaccaggacuaccagcagaaacaauaaaagacuuaaugagacaauuucucagaggacuagacuuccuacacgcaaacugcauaguacaucgagaccuaaaaccagaaaacauacuuguaacaucaggaggcacaguaaaacuagcagauuucggcuuagcacgaauauacagcuaccaaauggcacuaacaccaguaguaguaacacuaugguacagagcaccagaaguacuauuacaaucaacauacgccacaccaguagacauguggagcguaggaugcauauucgcagaaauguuuagaagaaaaccacuauucugcggaaacucagaagcagaucaauuaggaaaaauauucgaucuaauaggacuaccaccagaagacgacuggccaagagauguaucacuaccacgaggagcauuuccaccaagaggacccagaccaguacaaagcguaguuccagaaauggaagaaucaggagcacaauuauuacuagaaaugcuaacauucaacccacacaaaagaauaucagcauucagagcauuacaacacaguuaccuacacaaagacgaaggaaacccagaauaa

SEQ ID NO: 3622 - RNA, 336 nt, Artificial Sequence
  AAH15669 variant
auggcaacaaguagauaugaaccaguagcagaaauaggaguaggagcauauggaacaguauauaaagcaagagauccacauagcggacauuuuguagcauuaaaaaguguaagaguaccaaauggaggaggaggaggaggaggauuaccaauaaguacaguaagagaaguagcauuauuaagaagauuagaagcauuugaacauccaaauguagucagacuaauggauguaugugcaacaucaagaacagacagagaaauaaaaagauguuuuguagaaagucuaaguucaguagaaacauuaaaaccaacaucaugggcaaaaucacuaacauaa

SEQ ID NO: 3623 - RNA, 429 nt, Artificial Sequence
  ACY78326 variant
auggaaccagcagcaggaaguaguauggaaccaagugcagauugguuagcaacagcagcagcaagaggaagaguagaagaaguaagagcauuauuagaagcaggagcauuaccaaaugcaccaaauaguuauggaagaagaccaauacaaguaaugaugaugggaagugcaagaguagcagaauuauuauuauuacauggagcagaaccaaauugugcagauccagcaacauuaacaagaccaguacaugaugcagcaagagaaggauuucuagauacauuaguaguauuacauagagcaggagcaccaugugcaaugccaggagcaguauguccauggacaugguuaagaaguugggcaauagcaaugagucauggaacaugugcaagauuaagaggagcaccagaagcaguaacaaugccagcauaa

SEQ ID NO: 3624 - RNA, 351 nt, Artificial Sequence
  EAW58598 variant
auggaaccagcagcaggaaguaguauggaaccaagugcagauugguuagcaacagcagcagcaagaggaagaguagaagaaguaagagcauuauuagaagcaggagcauuaccaaaugcaccaaauaguuauggaagaagaccaauacaaguaggaagaggaagugcagcaggagcaggagauggaggaagauuauggagaacaaaauuugcaggagaauuagaaaguggaagugcaaguauauuaagaaaaaaaggaagauuaccaggagaauuuagugaaggaguauguaaucauagaccaccaccaggagaugcauuaggagcaugggaagcaaaagaagaagaauaa

SEQ ID NO: 3625 - RNA, 471 nt, Artificial Sequence
  AFN61598 variant
auggaaccagcagcaggaaguaguauggaaccaagugcagauugguuagcaacagcagcagcaagaggaagaguagaagaaguaagagcauuauuagaagcaggagcauuaccaaaugcaccaaauaguuauggaagaagaccaauacaaguaaugaugaugggaagugcaagaguagcagaauuauuauuauuacauggagcagaaccaaauugugcagauccagcaacauuaacaagaccaguacaugaugcagcaagagaaggauuucuagauacauuaguaguauuacauagagcaggagcaagauuagauguaagagaugcauggggaagauuaccaguagauuuagcagaagaauuaggacauagagauguagcaagauauuuaagagcagcagcaggaggaacaagaggaaguaaucaugcgagaauagaugcagcagaaggaccaagugacauaccagauuaa

SEQ ID NO: 3626 - RNA, 327 nt, Artificial Sequence
  CCQ43815 variant
auggaaguaaugaugaugggaagugcaagaguagcagaauuacuauuauuacauggagcagaaccaaauugugcagauccagcaacauuaacaagaccaguacaugaugcagcaagagaaggauuuuuagauacauuaguaguauuacauagagcaggagcaagauuagauguaagagaugcauggggaagauuaccaguagauuuagcagaagaauuaggacauagagauguagcaagauauuuaagagcagcagcaggaggaacaagaggaaguaaucaugcaagaauagaugcagcagaaggaccaagugauauaccagauuaa

SEQ ID NO: 3627 - RNA, 399 nt, Artificial Sequence
  AAA82236 variant
augguaagaagauuuuuaguaacauuaagaauaagaagagcauguggaccaccaagaguaagaguauuuguaguacauauaccaagauuaacaggagaaugggcagcgccaggagcaccagcagcaguagcauuaguauuaauguuauuaagaucacaaagauuaggacaacaaccauuaccaagaagaccaggacaugaugauggacaaagaccaaguggaggagcagcagcagcaccaagaagaggagcacaauuaagaagaccaagacauagucauccaacaagagcaagaagauguccaggaggauuaccaggacaugcaggaggagcagcaccaggaagaggagcagcaggaagagcaagauguuuaggaccaagcgcaagaggaccaggauaa

SEQ ID NO: 3628 - RNA, 2109 nt, Artificial Sequence
  CCDS12584.1 variant
auggaaucucccucagccccaccacacagaugguguaucccauggcaacgacuauugcuaacagccagucuucuaacauucuggaaucccccaaccacugcaaaauuaaccauagaaucuaccccauuuaauguagcagaagguaaagaaguucucuuauuaguacacaauuuaccucaacaccucuuuggauacaguugguauaaaggagaaagaguagauggaaauagacaaaucauaggauauguuauagguacacaacaagcaacccccggcccagcauauucaggaagagaaauaauuuauccaaaugcaucauuacuaauccaaaacauaauacaaaacgacaccggcuucuacacccuacauguuauaaaaucagaccuagugaacgaagaagcaacaggucaauuucgugucuacccugaauuaccaaaacccuccauaucauccaacaauucuaaaccaguagaagauaaagaugccguagcuuuuacaugcgaaccugaaacgcaagaugcaaccuaccuauggugggucaauaaccaauccuuaccaguuucaccacgauuacaauuaucaaauggaaaccguacacucacacuguucaacgucaccagaaaugacacagcaucauacaaaugcgaaacacaaaacccaguuucagcaagaagaucagauaguguaauacuaaacguauuauacggacccgaugcaccuacuauaucaccauuaaauacaaguuacagaaguggugaaaauuuaaaccucucuugccacgcagccucgaacccacccgcucaauacuccugguucguaaauggcacauuccaacaaucaacccaagaacuuuucauuccaaacauaacagucaacaacuccgguucauacacaugucaagcacauaacucagauaccggacucaaucgcaccacaguaacaacaauaacaguauaugcugaaccaccaaaaccauuuauaacaucaaacaacucaaauccaguagaagaugaagaugcaguagcauuaacaugugaaccggaaauacaaaauaccacauauuuaugguggguaaacaaucaaucccuaccuguauccccaagacuacaauuauccaacgauaauagaacacuaacauuauuaucaguaacacguaacgacguaggaccauaugaaugcggaauacaaaaugaacuaucagucgaccacuccgaccccguaaucuuaaacguacuuuacggacccgaugacccuacaauaucaccaucauacaccuacuauagaccaggaguaaaccuaagccuaucaugccaugcagcaucaaacccuccugcacaauacucaugguuaauagauggcaacauacaacaacacacacaagaacuauucauaucuaacauaacagaaaagaauagugguuuauauacaugccaagcaaacaauucagcauccggucauucaagaacaaccgucaaaacaauaaccguauccgcagaacuaccaaaacccucaaucagcucaaauaacucaaaaccaguagaagacaaggacgcaguagccuucacaugcgaacccgaagcccagaacaccacauaccuauggugggucaauggccaaucuuuaccuguaucaccuagacuccaauuaucaaaugguaauagaacccuaacacuauucaauguaacuagaaaugacgcacgcgccuacguaugcggaauacaaaacuccguaucagcaaaucguagcgacccuguaaccuuagacguucuauauggcccagacacaccaauaauaucaccaccagacucaucauaccuuucaggagcaaacuuaaacuugucaugccacucagcaagcaacccaaguccacaauacucauggagaauuaaugguauaccccaacaacacacacaaguacucuuuauugcaaaaauaaccccaaauaauaacggaacuuacgcauguuuuguuucuaaucuagcaacaggccgcaauaacucaaucguaaaaucuauaaccgucucugccucaggaaccuccccaggcuuaagcgcuggugcaacagucggcaucaugaucggaguucucguaggagucgcacuaauauaa

SEQ ID NO: 3629 - RNA, 1035 nt, Artificial Sequence
  AAA51739 variant
augggaccaccuucagcuccaccuugucgacuacacguaccauggaaagaaguccuacuaacagcaucacuacuaacauucuggaauccuccaacaaccgccaaacuuaccauagaauccacaccauucaaugucgcagaaggaaaagaaguauuacuacucgcacauaacuuaccccaaaauagaauaggcuacucuugguacaaaggagaaagagucgacggaaauucauuaauaguaggauacguaauaggaacacaacaagcaacaccaggcccagcauacucaggaagagaaacuauauacccaaacgcaucacuauuaauacaaaacguaacacaaaaugacacaggauucuacacacuacaaguaaucaaaucagacuuaguaaacgaagaagcaaccggacaauuucacgucuacccagaacuaccaaaaccaagcauauccucaaacaauuccaacccaguagaagacaaagacgccguagcauucacaugcgaaccagaaguacaaaauacuaccuaccucugguggguaaacggccaaucacuaccagucucaccaagacuacaacuaucaaauggaaacaugacacuaacacucuuaucaguaaaaagaaacgacgcaggaucauaugaaugugaaauccaaaacccagcuucagcaaaucgaagcgacccaguaacacuaaauguacuuuauggaccagacggaccaacaauaucacccucaaaagcaaacuaccgaccaggugaaaaucuaaacuuaucaugccaugcagcaucaaauccuccagcacaauacagcugguucauaaacggaacuuuucaacaauccacacaagaauuauuuauacccaacauaacaguaaacaacuccgguucauacaugugccaagcacacaacucagcaacaggacuaaaccgaaccacagucacaaugauaacagucucaggaucagccccaguauuaucagcaguagcaacuguaggaauaacuauaggaguauuagcaagaguugcccuaauauaa

SEQ ID NO: 3630 - RNA, 1173 nt, Artificial Sequence
  AAB04533 variant
augggagcaacaaccauggaccaaaaaucacuaugggcaggaguaguaguauuacuccuccuacaagguggaagcgcauacaaauuaguaugcuauuucacaaauuggagccaagacagacaagaaccaggaaaauuuaccccagaaaauaucgacccauucuuaugcagccacuuaauauacucauuugcaucaauagaaaacaacaaagucauaauaaaagacaaaucagaaguaaugcuauaccaaacuauaaauucacucaaaacaaaaaacccaaaauuaaaaauauuacucucaauaggaggauaccuauuuggaucuaaaggauuccaccccauggucgauucaucaacaucaagacuagaauuuauaaacucaauaauacuauuccuaagaaaucacaauuucgacggacuagacgucucauggauauacccagaucaaaaagaaaauacacauuucacuguacuaauacacgaacuagcagaagcauuccaaaaagacuucacaaaaaguacaaaagaacgauuacuauuaacagcaggaguaucagcaggaagacaaaugauagacaacucauaccaagucgaaaaacuugcuaaagaccuugacuuuauaaaccuucuaucauuugacuuucauggaucaugggaaaaaccacuaauaaccggacacaacucacccuuauccaaaggauggcaagacagaggaccaucaucauauuacaacgucgaauacgcaguaggauauuggauacacaaaggaaugccaucagaaaaaguaguaaugggaauacccacauauggacacagcuucacauuagccagugcagaaacaacaguaggagcucccgcaucaggaccaggagcagcaggcccaauaacagaaucuucaggauuccuagccuacuacgaaauuugucaauuccuaaaaggcgcaaaaauaacaagacuacaagaccaacaaguaccauaugcaguaaaaggcaaccaaugggucggauacgaugauguaaaaucaauggaaaccaaaguacaauucuuaaaaaacuuaaaucuaggcggagccaugaucuggagcauagacauggacgauuucacaggcaaaagcuguaaucaaggaccuuacccccuaguacaagcaguaaaaagaucacucggaucacuauaa

SEQ ID NO: 3631 - RNA, 2832 nt, Artificial Sequence
  AAD40367 variant
augacacagagaucaauagcaggaccaauauguaauuuaaaauucguaacucugcuaguagcacuauccucagaacuccccuucuuaggcgcggguguacaauuacaggauaacggcuacaacggacuucuaauagcaauaaauccucaaguuccagaaaaccaaaaucuaauaucaaauauuaaagaaaugauaacagaagcaucauuuuauuuauuuaacgcaacaaaaagacgaguauucuuuagaaacauaaaaauucuaaucccagcgaccuggaaagcaaauaacaauucaaaaauuaaacaagaaucauacgaaaaagcaaacguaauagugacggauugguauggcgcacacggagacgacccauauacacugcaauaucgaggcugugguaaagaaggaaaauacauacauuuuacuccuaacuuucuauuaaaugacaacuuaacagcaggcuacgggucacgaggcagagucuuuguucacgaaugggcacaccuacgauggggaguauucgacgaauauaacaaugauaaaccauuuuauauaaauggacaaaaucagauaaaaguaacuagauguucaagcgauaucacaggaauauucguuugcgaaaaaggaccuugcccccaagaaaacuguauaauuuccaaauuauuuaaagaaggaugcacuuuuauauauaacucuacccaaaacgcaacagcuagcauaauguuuaugcaaucacuaaguuccguaguagaauuuuguaaugcaagcacacauaaccaagaagcgcccaauuuacaaaaucaaauguguucucucagaucagcaugggacgucauaacagauucagcagauuuucaccacucuuuucccaugaaugggacagaacuaccaccaccuccaacauuuucauuaguacaagcaggagauaaaguugucugucuaguacuagacguauccucaaaaauggcugaagcagacagauuacuacaauuacaacaagcagcggaguuuuacuuaaugcaaauaguagaaauacauacguucgucggcaucgcuucauucgauucaaaaggagaaauuagagcacaacuucaucaaauaaauucaaaugaugaucgaaaacuguuagucucauauuuaccaaccacaguuuccgcaaaaaccgauaucucaauuuguagcggucuaaagaaagguuucgaaguuguugaaaaacuaaauggaaaagcauaugguuccgucaugauccucguaacaucuggcgaugauaaacuacucggaaacugucuuccaacaguguuaucaucaggaagcacaauacacucuaucgcacuaggauccucugcagcaccgaaccuagaagaauuaucuagacuaacaggaggacucaaauucuuuguacccgacauaucgaacucaaauucaaugauugaugcauuuucacgcauaucuucaggcacaggagauauauuccaacaacacauacaauuggaauccacaggagaaaaugucaaaccucaccaucaacucaaaaauaccguaacugucgacaauacgguggguaacgacacaauguuuuuaguaacuuggcaagcaucgggaccaccagaaaucauacuauucgauccagacggucgaaaauauuacacgaauaacuuuauaacuaaucuaaccuucagaaccgcaucauuauggauaccaggcaccgcuaaaccaggacauuggacuuauaccuuaaacaauacacaccauucauuacaagcccugaaaguaacagugaccucacgcgccucuaacucagcuguaccaccagcuacaguagaagcguuuguugaaagagauagucuucauuuuccacauccaguaaugauauacgcaaauguaaaacaaggauucuauccuauccucaaugccaccguuacugccaccguagaacccgaaacaggagacccuguaacguuacgacuucuugaugauggagcaggagcugacguaaucaaaaaugauggaauauacuccagguauuucuuuucauuugcagcuaacggacguuauagucuaaaaguacauguaaaccauuccccaucuauuucaacaccagcucauagcaucccuggcucccaugcaauguacguaccaggcuacacagcgaauggaaauauacaaaugaacgcaccucguaaauccguaggacgaaacgaggaagaaagaaaauggggauucucucgagucucaagcggcggaucauucuccguccuaggaguacccgcaggaccacacccugauguauucccaccauguaaaauaauugaucuagaagcagugaaaguagaagaagaacucacacuauccuggacagcaccaggcgaagacuucgaucaaggucaagcuacuucauaugaaauaagaaugucuaaaucauuacaaaacauccaagacgacuucaauaaugcaauauuaguaaauacauccaaaagaaacccccaacaagccggaauacgugaaauauuuacauucagcccacaaaucucaacuaauggaccugaacaccaaccuaauggagaaacacaugaaagucacagaauuuacgucgcaauacgugccauggaccgaaauucuuuacaaucagcagucucaaacaucgcccaagcaccauuguuuauaccaccuaauagugauccugucccagcacgagauuaccuaauacuuaaaggcguacucacagcaaugggauuaauaggaauaauaugucuaauaauagucgucacacaccauacuuuaucacgcaaaaagagagcagauaagaaagaaaauggcaccaaacuauuauaa

SEQ ID NO: 3632 - RNA, 708 nt, Artificial Sequence
  AAF82135 variant
auggaagaagaaacacauacagaugcaaaaauaagagcagaaaacggaacaggaaguagcccaagaggaccaggauguaguuuaagacauuucgcaugcgaacaaaauuuauuaaguagaccagauggaucggcaucauuccuacaaggggacacaagcguacuagcaggaguauacggaccagcagaaguaaaaguaagcaaagaaauauucaacaaagcaacauuagaaguaauauuaagaccaaaaauaggauuaccaggaguagcagaaaagaguagagaaagacuaauaagaaacaccugugaagcagucguacucggaacauuacacccaagaacaagcauaacaguaguauuacaaguaguaucagaugcaggaucacuauuagcauguugcuuaaacgcagcauguauggcauuaguagaugcaggaguaccaaugagagcacuauuuugcggaguagcaugcgcacuagauagcgauggcacauuaguauuagauccaacaagcaaacaagaaaaagaagcaagggcaguacuaacauucgcauuagauagcguagaaagaaaauuacuaaugagcucaacaaaaggauuauacucagacacagaauuacaacaaugccuagcagcagcacaagccgcaagccaacacguauucagauucuauagagaaagccuacaaagaagauauagcaaaagcuaa

SEQ ID NO: 3633 - RNA, 1752 nt, Artificial Sequence
  CCDS6312.1 variant
auggaaguagccgcaaacuguucccuaagaguaaaaagaccacuacuagacccacgauucgaaggauacaaacuaucacuugaaccacuaccuugcuaccaauuagaacuagacgcagcagucgcagaaguaaaauuaagagacgaccaauacaccuuagaacacaugcacgcuuuuggaauguacaacuauuuacacugcgauucaugguaccaagacucaguauacuacauagacacacuaggaagaaucaugaauuuaacaguaaugcucgauacagcacuaggaaaaccaagagaaguuuuucgacuaccuacugacuuaacagcaugcgacaaccgauuaugcgccucaauacacuucaguucaucaacaugggucacacugagcgaugguacaggacgacuauacgucaucggaacaggagaaagaggaaauuccgcaucagaaaaaugggaaaucauguucaacgaagaauuaggagacccuuuuauaauaauucauucaauaagccuacuaaacgcagaagaacacaguauagcaacucuacuacuaagaauagaaaaagaagaacuggacaugaaaggaucaggcuuuuacguaucacuagaauggguaacuauaucaaaaaaaaaucaagacaacaaaaaauacgaaauaauaaaaagagacauacuaagaggaaaaucaguaccccauuacgcagcaauugaaccagacggaaacggauuaaugaucguuucauacaaaaguuuaaccuuuguacaagccggacaagacuuagaagaaaacauggacgaagacauaucugaaaaaauaaaagaaccacucuauuacuggcaacaaacagaagacgauuuaacugucacaauucgauuaccagaagauucaaccaaagaagacauccaaauacaauuuuuaccugaccauauuaacaucguguuaaaagaucaucaauucuuagaggggaaauuauauucaucaauagaucaugaauccaguacauggaucauaaaagaauccaauagucuagaaauaucacuaauaaaaaaaaacgaaggacuaacauggccggaacuaguaauaggagauaaacaaggagaauuaauaagagauucagcacaaugcgcagcaauagccgaacguuuaaugcauuuaacaucagaagaauuaaacccuaauccagauaaagaaaaaccgcccuguaacgcccaagaauuagaagaaugcgacauauuuuucgaagaauccuccucacuauguagauucgauggaaacacucuaaaaacaacacacguaguaaaccuaggaucaaaccaguaccuauuuucaguaauaguugacccaaaagaaaugccaugcuuuugccuuagacacgauguagacgcauuacuauggcaaccacauucaagcaaacaagacgauaugugggaacacauagcaacuuucaacgcccuaggauacguacaagcaucaaaacgagacaaaaaauuuuuugcaugcgcaccaaacuacuccuacgcagcccuaugcgaauguuuaagaagaguauuuauauacagacaaccagcaccaaugaguacaguauuauacaaucgaaaagaaggaagacaaguuggucaaguagcaaaacaacaaguagcaagcuuagaaaccaacgacccuauccuaggcuuccaagcaacaaaugaacgacuauucguauuaacaacaaaaaauuuauucuuaauaaaaguaaacacugaaaacuaa

SEQ ID NO: 3634 - RNA, 1563 nt, Artificial Sequence
  CCDS41288.1 variant
augaguucaccacuagcaucacuuucaaaaaccagaaaaguuccccuacccucagaaccaaugaacccuggaagaagaggaauacgaauauacggagaugaagacgaagucgauauguuaucagacggaugugguagugaagagaaaauauccguacccucauguuacgguggaauaggagcuccaguaagucgacaaguaccagcaagucaugacucagaacucauggcauuuaugacaagaaaacuaugggaucuagaacaacaaguaaaagcacaaacagacgaaauauuaucaaaagaccagaaaauugcagcauuagaagauuuaguacaaacacuaagaccacacccagcagaagcaacacuacaaagacaagaagaacuagaaacaaugugcguacaauuacaaagacaaguaagagaaauggaaagauuucuaucagauuauggacuacaauggguuggugaaccaauggaucaagaagacucagaaagcaaaacuguaucagaacauggagaacgagacuggaugacagcaaagaaauucuggaaaccaggggacucauuagcaccaccagaaguagacuucgaccgucuauuagcaucauuacaagauuuaagcgagcuagucguugaaggugauacacaaguaacaccaguaccagguggagcuagauuacgaacauuagaaccaauaccacuuaaauuauauagaaacggaauaaugauguuugacggaccauuccaaccauucuaugauccaaguacacaacgaugucuacgagauaucuuagacgguuucuuuccaucugaacuacaaagacuauauccuaacggaguacccuuuaaaguaagugacuuaagaaaucaaguuuauuuagaagacgguuuagacccuuuuccuggagaaggaagaguaguagguagacaacuaaugcauaaagcccuagacagaguagaagaacauccaggauccagaaugacagccgaaaaauuucucaauagacugccuaaauuuguuauaagacaaggugaaguuauagauauaagaggaccaauaagagauacacuacaaaauugcugcccguuaccugcaagaauacaagaaaucguaguagaaacaccaacguuagcagcugaaagagaaagaucacaagaaucaccaaauaccccugcaccaccacuaucaauguuaagaauaaagucugagaauggcgaacaagcauuuuuauugaugaugcaaccagacaacacaauaggagacguuagagcacuacuagcucaagcaagaguuauggaugcaucagcauuugaaauauuuucaacauuuccuccaacacuauaucaagacgauacauuaacacuacaagcugcuggccuaguaccuaaagcagcacuauuauuaagagcacguagagcaccaaaaagcagcuuaaaauuuucaccaggaccauguccaggaccaggaccagguccaagcccaggaccaggcccaggaccaaguccaggacccggacccggaccaucaccuuguccaggacccucaccaaguccccaauaa

SEQ ID NO: 3635 - RNA, 429 nt, Artificial Sequence
  AAA88022 variant
auggcaacaaaaauagauaaagaagcauguagagcagcauauaacuuaguaagagacgacggaagugcaguaauauggguaacauucaaauacgacggaucaacaauaguaccaggagaacaaggagcagaauaccaacacuucauacaacaauguacagacgacguaagauuauucgcauucguaagauuuacaacaggggaugcaaugagcaaaagaucaaaauuugcacuaauaacauggauaggagaaaacguaagcggacuacaaagagcaaaaacaggaacagacaaaacauuaguaaaagaaguaguacaaaacuuugcaaaagaauuuguaauaagcgacagaaaagaacuagaagaagacuuuauaaaaagcgaacuaaaaaaagcaggaggagcaaauuacgaugcacaaacagaauaa

SEQ ID NO: 3636 - RNA, 495 nt, Artificial Sequence
  CCQ43891 variant
auggcaacaagggauccauggguauggauggcaaguccagauuuucaagcaagaaaaggaaaaagaguacaucaagaaacauuagcaccaggagaaacaaaagauaaaauggaauuauuaggauuaagaggaccauuagauuuauuaggaccaggugcauuauuagcaacauuaggaaaaauggcaccaggagaacauaaagcacaaagagcaccaaaagaaaguccagauaaaacagcaagaugggcacaaagagauccacaaggaccaagaguaaguuuagaauauuuagaaagacgagcaacaaugggacaucaagcaaguuuagaucaucaaggaccaagagcaagucaaggagcauggggacuaggagaaagaacaguauggacaguaccacaagauagacgaggaaguuuagcaacagaagcaagaauggaauuacaaggaccaggaguaccacaagcaaguagagcaaguagagaaacacaaugguaa

SEQ ID NO: 3637 - RNA, 1623 nt, Artificial Sequence
  AAO18361 variant
augggaccaggagaaagggcaggaggaggaggagaugcagggaaaggcaaugcagcuggcgguggggguggaggaaggucagcaacuacagcuggaaguagagcgguaucagcacuauguuuguuauugaguguagguagugcagcagcuugucugcuauuaggaguacaggcagcggcuuuacaagguagaguagcagcauuagaggaagaaagggaauuauugagacgagcaggaccuccaggagccuuagacgcaugggcagaaccacauuuagagagauuauuacgugaaaaguuagauggacuagcgaaaauaagaacugcaagagaagcaccaagugaaugcguaugcccaccgggcccaccgggaagaagagggaagccaggaagaagaggagauccaggcccuccaggacaaagcgguagagauggauauccaggaccucuuggauuggaugguaaaccaggauuaccagggccaaagggagaaaagggugcaccaggagacuucggaccaagaggagaccaaggucaagauggugccgcaggaccaccaggaccaccaggaccaccaggagcaagaggaccaccgggagauacuggaaaagauggcccaagaggagcucaaggaccggcaggaccaaaaggagaaccaggacaagauggagaaaugggaccuaaagggccgccaggucccaaaggugaaccaggaguaccuggaaagaaaggagaugauggaacaccaagccaaccaggaccaccgggaccaaaaggugaacccggaaguauggggccacgaggcgaaaacgguguagauggagcaccuggaccaaaaggagaaccaggucauagaggaacagauggugcagcagguccaagaggagcaccgggacucaaaggagaacaaggggauacgguaguaauagacuaugaugguaggauauuagaugcuuuaaaaggaccuccuggaccgcaagggccaccaggaccaccagguauuccaggagcaaaaggagaauuagguuuaccaggagcaccggguauagauggagaaaaaggaccaaaaggacaaaaaggagauccaggagagccgggaccagcaggucuaaaaggagaagcaggggagaugggauuaucaggguuaccaggagcagauggcuuaaaaggggaaaaaggugaaagugcaagcgauucauugcaagaaucucuagcgcaauuaauaguagaaccaggaccuccgggaccuccaggaccaccuggcccaaugggauuacaaggaauacaaggaccaaaagguuuggauggugcuaaaggggaaaaaggggcaaguggugaaagagggccaaguggauuaccggguccagugggaccuccuggauuaauaggucuaccgggaacaaaaggagaaaaagggagaccaggugagccaggauuggauggauuuccaggaccaagaggagaaaaaggugauagaucagaaaggggugaaaaaggagaaagagguguaccaggaagaaaaggaguuaaaggacaaaaaggagaaccuggaccaccaggauuagaucagccuuguccugugggcccagauggacuaccaguuccggguuguuggcauaaauga

SEQ ID NO: 3638 - RNA, 492 nt, Artificial Sequence
  CAG25548 variant
augcuagcaagagcacuacuacuaugcgcaguacuagcacuaucacacacagcaaaccccugcugcucacacccaugccaaaacagaggaguaugcaugucaguaggauucgaccaauacaaaugcgacugcacaagaacaggauucuacggagaaaacugcucaacaccagaauuccuaacaagaauaaaauuauuccuaaaaccaacaccaaacacaguacacuacauacuaacacacuucaaaggauucuggaacguaguaaacaacauaccauuccuaagaaacgcaauaaugucauacguauuaacaucacgaucacaccuaauagacucaccaccaacauacaacgcagacuacggauacaaaucaugggaagcauucucaaaccuaucauacuacacaagagcauuaccaccaguaccagacgacugcccaacaccacuaggaguaaaagcacuacacgcaucaguauuccaagacagaucauaa

SEQ ID NO: 3639 - RNA, 1632 nt, Artificial Sequence
  AAC50809 variant
augggaacaucauuaucacccaaugauccauggccacucaauccucuuucaauucaacaaacaacacuacuuuuauuauuaucuguucucgcuacuguacauguaggucaaagauuauuaagacaaagaagaagacaacuaagaucggcuccuccaggcccguuugcauggccccuaauuggaaacgcagccgcuguuggacaagcagcacaucuauccuucgcaagauuagcaagacgauauggagauguguuucaaauaagauuaggaucuugucccauaguaguucuaaauggugaaagagcaauacaucaagcucuaguacaacaaggaucagcauuugcagauagaccagcuuuugcauccuuuagaguaguaucuggagguagaucaauggcauuuggacauuacagugaacauuggaaaguacaaagacgagcagcacauucgaugaugagaaauuucuuuacacgacaacccagaucucgacaaguuuuagaaggccauguuuugucugaagcuagagaauuagucgcuuuauuaguucgcggaucagcugauggcgcauucuuagauccaagaccccucacuguaguagcaguugcaaauguuauguccgcuguauguuuugguuguagauauucacaugaugacccugaauuuagagaacuacuaucacacaacgaagaauuuggacguaccguaggagcaggaucccuaguugacguaaugccaugguuacaauauuuuccaaauccaguaagaacaguuuuuagagaguucgaacaacuaaauagaaauuucucaaauuucauauuagauaaauuuuuaagacacugcgaaucuuuaagaccaggugcagcaccuagagacaugauggaugcuuuuauacucucagcugaaaagaaagcagcaggagacucucacggagguggagcucgauuagauuuagaaaacgucccagcaacuauaacugauauauuuggagcuucucaagauacucuaucaacugcucuacaaugguuacuccuacuauucacucgauacccugauguucaaacacgaguacaagcugaacuagaucaaguagucgguagagacagauuaccauguaugggagaccaaccaaacuuaccuuacguucucgcauuccuauaugaagccaugagauuuucaucauucgucccagucacaauaccacaugccaccacugcuaacacuucaguauuaggauaucacauaccaaaagauacuguuguuuuuguaaaucaauggucaguaaaucacgacccgcucaaauggccaaaucccgaaaauuuugauccugcaagauuuuuagauaaagauggacuaauaaacaaagauuuaacaucaagaguaaugauauucagcguugguaaaagaagaugcauuggagaagaacuuucaaaaaugcaauuauuucuauucauaucaauauuagcacaucaaugcgacuuuagagcuaacccuaacgaaccagcaaaaaugaacuuuucauauggacuuacaauaaaaccaaaaucuuucaaaguuaauguaacccuaagagaaaguauggaauuacuagauucagcaguacaaaaucuacaagcaaaagaaacaugucaauaa

SEQ ID NO: 3640 - RNA, 333 nt, Artificial Sequence
  NM_001129828 variant
auguggaugggacuaauacaauuaguagaaggaguaaaaagaaaagaucaaggauucuuagaaaaagaauuuuaccauaaaacaaacauaaaaaugagaugugaauuucuagcaugcuggccagcauucacaguauuaggagaagcauggagagaucaaguagacuggagcagacuacuaagagaugcaggauuaguaaaaaugagcagaaaaccaagagcaagcucaccacuaagcaauaaccauccaccaacaccaaaaagauucccaagacaaccaggaagagaaaaaggaccaauaaaagaaguaccaggaacaaaaggaagcccauaa

SEQ ID NO: 3641 - RNA, 384 nt, Artificial Sequence
  NM_001129826 variant
auguggaugggacuaauacaauuaguagaaggaguaaaaagaaaagaucaaggauucuuagaaaaagaauuuuaccauaaaacaaacauaaaaaugagaugugaauuucuagcaugcuggccagcauucacaguauuaggagaagcauggagagaucaaguagacuggagcagacuauuaagagaugcaggauugguaaaaaugagcagaaaaccaagagcaagcucaccacuaaguaauaaccauccaccaacaccaaaaagaagaggaagcggaagacauccauuaaacccaggaccagaagcacuaucaaaauuuccaagacaaccaggaagagaaaaaggaccaauaaaagaaguaccaggaacaaaaggaucaccauaa

SEQ ID NO: 3642 - RNA, 570 nt, Artificial Sequence
  AAI40914 variant
augacagauaaaacagaaaaaguagcaguagauccagaaacaguauucaaaagaccaagagaaugcgauagcccaaguuaucaaaaaagacaaagaauggcauuauuagcaagaaaacaaggagcaggagacucacuaauagcaggaagcgcaaugucaaaagcaaaaaaauuaaugacaggacacgcaauaccaccaucacaauuagacucacaaauagacgauuucacaggauuuagcaaagacagaaugaugcaaaaaccaggaaguaaugcaccaguaggaggaaacguaacaagcucauucaguggagaugacuuagaaugcagagaaacagcaagcucaccaaaaagccaaagagaaauaaaugcagacauaaaaagaaaacuaguaaaagaacuaagaugcguaggacaaaaauaugaaaaaauauuugaaaugcuagaaggaguacaaggaccaacagcaguaagaaaaagauuuuucgaaagcauaaucaaagaagcagcaaggugcaugagaagagacuuuguaaaacacuuaaaaaaaaaauuaaaaagaaugauauaa

SEQ ID NO: 3643 - RNA, 795 nt, Artificial Sequence
  AAH20662 variant
augcucagacuacuaagauuagcauuggcauuuuacggaagaacagcagauccagcagaaagacaaggaccacaacaacaaggauuaccacaaggagauacacaacuaacgacaguacaaggaguaguaacaucauuuuguggagauuauggaaugauagacgaaagcauauacuuuagcucggacguaguaacaggaaauguaccacuaaaaguaggacaaaaaguaaaugucguaguagaagaagauaaaccacauuauggauugagagcaauaaaaguagauguaguaccaagacacuuauauggagcaggaccaucagacucgggcacaagaguacuaauaggauguguaacaagcauaaacgaagauaauauauacauaucaaauucaauauauuucucaauagcaauaguaagugaagauuuuguaccauacaaaggagaucuauuagaaguagaauauaguacagaaccaggaauaagcaauauaaaagcaacgagcguaaaaccaauaagaugcauacacacagaagaaguaugcauaacaaguguacacggaagaaaugguguaauagauuauacaauauuuuucacacuagauagcguaaaauuacccgacggauauguaccacaaguagacgauauaguaaacguaguaaugguagaaagcauacaauuuuguuuuauauggcgagcaauaucaauaacaccaguacacaaaaguucaagcggauuccaagacgauggaggacuaggaagaccaaaaagagaaagaagaagucaaucaauauaa

SEQ ID NO: 3644 - RNA, 2844 nt, Artificial Sequence
  CCDS735.1 variant
augucauuaccauccagacaaaccgcaauaauagucaacccacccccgccugaauauauaaauacaaagaaaaaugggagacuaacuaaucaacuacaauaucuacagaaagucguccuaaaagaccuauggaaacacucauucucauggcccuuccaaagaccaguagacgcugugaaacugcaacuuccugauuacuacacaauuauuaaaaauccgauggaccugaauacaauuaagaaacgacuagaaaacaaauacuaugcaaaagcaucugaaugcauagaagacuuuaacacaauguuuuccaauuguuaucucuacaauaaacccggcgacgacauaguuuuaauggcccaagcacuagaaaaauuauuuaugcagaaauuaucacaaaugccacaagaggaacaaguagucggcguaaaagaaagaauaaagaaaggaacacaacaaaauaucgcaguaucaucagcaaaagaaaaaucaucucccagcgcgaccgaaaaaguguuuaaacaacaagaaauaccgucaguauucccuaaaacgucaauaaguccuuuaaacguaguacaaggagcauccguuaacucaucaucacaaacagcagcucaaguaacaaaaggaguaaaacgaaaagcagacacaacaacaccagcaacaucugcaguuaaagcaagcagcgaguucagcccaacauucacagagaaaaguguagcacuaccaccaauaaaagaaaauaugcccaaaaacguacuaccagacagccaacaacaauauaacguaguuaaaacaguaaaaguuacugaacaacuacgacauugcagugaaauuuuaaaagaaauguuagcgaagaaacauuuuucauaugccuggccauuuuauaauccaguagaugucaacgcacucggauuacacaacuauuacgacgucguuaaaaacccaauggaucugggcacgauaaaagagaaaauggauaaccaagaauauaaagaugcguacaaauucgcugcugacguaagacucauguuuaugaacugcuauaaauauaacccgccagaccacgaaguaguaaccauggccaggaugcuacaagauguuuuugaaacacauuucagcaaaauccccauagaacccguagaaaguaugccacuauguuacauaaaaacugauauaacagaaacaacgggcagagaaaacacaaaugaagcaaguagcgaaggaaacucaucugacgacucagaagacgaacgugucaaacgacuagcaaaauugcaagaacaauuaaaagcaguacaucagcaacuacaaguacucucccaagucccauucagaaaacuaaauaaaaagaaagaaaaaucuaagaaagagaaaaagaaagaaaaagugaacaauagcaacgaaaauccacgaaaaaugugugaacagaugagacuaaaagaaaaaucaaaaaggaaccagcccaagaaacguaaacaacaauucauagggcuaaaaucagaagacgaagacaaugcaaaaccaaugaacuacgacgagaaaagacaauuauccuuaaacauaaauaaauuaccaggagacaaacuugggagaguuguacauauaauacaaucuagagaacccucccuaucaaauucaaaccccgaugaaauagaaauagauuucgaaacucuaaaagcaagcacacugagggaauuggaaaaauauguaagcgcaugcuuaagaaaaagaccuuuaaaaccaccagcaaagaaaauaaugauguccaaagaagaauuacauagucaaaagaaacaagaauuagagaaaagauuauuggacguaaauaaccaacuaaauucaagaaaacgacaaaccaaauccgacaaaacacaaccauccaaagcaguagaaaauguaucacgucuaucagaaaguucaaguucaucuuccuccucaagugaaagcgaaucuuccucaucagaccucucaagcuccgauucaucagacucggaaucggaaauguucccaaaauuuacagaagucaaaccaaacgauucaccgucaaaagaaaauguaaagaaaaugaaaaaugaaugcaucccuccagaaggaagaacaggugucacucaaauaggauauugcguccaagacacuacaucugcuaacacaacauuaguacaccaaacaacacccucucauguaaugccaccaaaccaucaccaacuagcauucaauuaccaagaacuagaacaucugcaaacagucaaaaauauaucaccacuacaaauccuaccaccaucaggugacucagaacaauuaucuaauggaauaacagucaugcacccgucuggagacagcgauacaacaauguuagaaucagaaugccaagcaccaguacaaaaagauaucaaaauuaaaaaugcggauucauggaaaucauuaggcaaacccgucaaacccucaggagugaugaaaucaucagacgaacuauucaaccaauucagaaaagcagccauagaaaaagaaguaaaagcaagaacacaagaacuaauacgaaaacauuuagaacaaaauaccaaagaacucaaagcaucucaagaaaaucaaagagauuuaggaaauggauugaccguugaauccuuuuccaauaaaauccaaaauaaaugcuccggagaagaacaaaaagaacaccaacaguccucggaagcacaagacaaaagcaaauuauggcuauuaaaagauagagacuuagcccgccaaaaagaacaggaaagaagaagaagagaagcaaugguaggcacuauagauaugacccuacaaucagacauaaugacuauguucgaaaacaauuucgacuaa

SEQ ID NO: 3645 - RNA, 543 nt, Artificial Sequence
  CCDS35455.1 variant
augcaagcagaaggaagaggaacaggaggaucaacaggagaugcagauggaccaggaggaccaggaauaccagauggaccaggaggaaaugcgggaggacccggagaagcaggagcaacaggaggaagaggaccaagaggagcaggagcagcaagagcaaguggaccaagaggaggagcuccaagaggaccacauggaggagcagcaagugcacaagauggaagauguccauguggagcaagaagaccagauagcagauuauuagaauuacauauaacaaugccauuuucaaguccaauggaagcagaauuaguacgaagaauauuaaguagagaugcagcaccauuaccaagaccaggugcgguuuuaaaagauuuuacaguaucaggaaauuuacuauuuauaagauuaacagcagcagaucauagacaauuacaauuaaguauaagcucauguuuacaacaacuaucauuauuaauguggauaacacaauguuuucuaccaguauuuuuagcacaagcaccaucaggacaaagaagauaa

SEQ ID NO: 3646 - RNA, 633 nt, Artificial Sequence
  CAA10196 variant
augcaagcagaaggacaaggaacugggggaagcacaggagaugcagauggaccgggaggaccaggaauaccagauggaccagguggaaaugcaggaggaccaggagaagcaggagcaacaggaggaagaggaccaagaggagcaggagcagcaagagcaaguggaccaagaggaggagcaccgagaggaccacauggaggagcagcaagugcacaagauggaagauguccauguggagcaagaagaccugauaguagauuacuacaacuacauauaacaaugccauuuucaaguccaauggaagcagaauuaguaagaagaauauuaucaagagaugcagcaccauuaccaagaccaggagcaguauuaaaagauuuuacaguaucaggaaauuuauuauuuaugaguguaagagaucaagauagagaaggagcaggaagaaugagaguaguaggauggggauuaggaagugcaaguccagaaggacaaaaagcaagagauuuaagaacaccaaaacauaaaguaagugaacaacgaccaggaacaccaggaccgccaccaccugaaggagcacagggagauggauguagagggguagcauuuaauguaauguuuagcgcaccgcauauauaa

SEQ ID NO: 3647 - RNA, 1992 nt, Artificial Sequence
  CCDS13459.1 variant
auggcagcgacugaaauaucaguacuaucagaacaauucacaaaaauaaaagaacuugaauuaaugccugaaaaaggacuaaaagaagaagaaaaagacggugucuguagagaaaaagaccaucgaucuccaucagaacucgaagcagaaagaacaucaggagcauuccaagacucaguacuagaagaagaagucgaacucguccuggcaccgucugaagaaagcgaaaaauauauacuaacacuucaaacaguucauuuuacauccgaggcaguugaauuacaagacaugucacuauuaucaauucaacaacaagaaggaguacaaguaguaguacaacaaccaggaccaggccuacuaugguuagaagaaggaccaagacaaucacuacaacaaugcguagcaauaucaauacaacaagaacuauauucaccacaagaaauggaaguacuacaauuccacgcacuagaagaaaacgucaugguagccagugaagauucaaaacuagcagucaguuuagcagaaaccacaggauuaauaaaacuagaagaagaacaagagaaaaaccaacuauuagcagaaagaacaaaagaacaacuauuuuucgucgagacaaugaguggagacgaaagaucggaugaaauaguauugacaguaagcaauucaaauguagaagaacaagaagaccaacccacagccggacaagcagaugcagaaaaagcaaagaguaccaaaaaucaaagaaaaacuaaaggcgccaaagguacuuuucauugcgauguaugcauguuuacaucaucaagaaugucaucauuuaacaggcauaugaaaacccauaccagugaaaaaccgcaccuaugucaucucugcuuaaaaaccuucagaacaguaacauuacuacgcaaccacguuaauacacacacaggcacaagaccauacaaaugcaaugauuguaacauggcauucguuacaucaggagaauuaguuaggcauagaagauacaaacauacacaugaaaaaccauucaaaugcucaauguguaaauacgccucaguagaagcaaguaaacuuaaacgacauguaaggagccacacaggagaaagaccauuccaaugcugccaauguucauacgcaucaagagacaccuacaaacucaaaagacauaugcggacacauucaggcgaaaaaccauaugaaugccacauaugccauacaagauuuacacaauccggaacaaugaaaauccacauauuacaaaaacacggggaaaacguaccaaaauaccaaugcccacacugugcaaccauaauagcaagaaaaucagacuuaagaguacauaugagaaaccuacaugcauacucagccgcagaacuuaaaugccgauacuguucagcagucuuucaugaaagguacgcauuaauccaacaccagaaaacacauaaaaacgagaaaagauucaaauguaagcauuguuccuaugcuugcaaacaagaaagacauaugacagcccauauacgaacacacacaggagaaaaaccauucacaugccucagcuguaauaaauguuuuagacaaaaacaacuucucaaugcccacuuuagaaaauaucacgaugcaaacuuuaucccuacaguauauaaaugcuccaaaugcggcaaaggauucucacgcuggauaaacuuacauagacacagugaaaaauguggaagcggagaagcaaaaucagcagccucgggaaaaggacgaagaacaagaaaaagaaaacaaacaauacuaaaagaagccaccaaaggacaaaaagaagccgcaaaaggauggaaagaagcagcuaacggagacgaagcagcagcagaagaagccucaacaacaaaaggagaacaauucccaggagaaauguuuccaguagcauguagagagacaacugcuagaguaaaagaagaaguagacgaaggaguaacaugcgaaauguuauuaaacacaauggacaaauaa

SEQ ID NO: 3648 - RNA, 2148 nt, Artificial Sequence
  CCDS11368.1 variant
augucacaaguuaugucaucgccacuuuuagcugggggacaugcagugucacuagcaccaugugaugaaccaagaagaacacuucacccugcaccaucccccucauuacccccacaaugcucuuacuauacuacagaaggauggggcgcucaagcccucauggccccugucccuuguaugggaccacccggucgauuacaacaggcaccacaaguagaagccaaagcuacauguuuucuaccuucaccuggagaaaaagccuuaggaacuccagaagauuuagacucuuacauagacuuuucauuagaaagucuaaaucaaaugauuuuagaacuagacccaacauuucaacuacuuccuccaggaacaggaggaucacaagcagaacuagcacaaucaaccaugucaaugcgaaagaaagaagaaucagaagcacuagauauaaaauauauagaaguuacuucugcaagaucacgcugccacgacggaccacaacacuguuccucaccuucugucaccccuccauucggaucauuaaggaguggaggacuuuuacuaucuagagauguacccagagaaacacgcucauccucagaaucauuaauauuuucaggaaaccaaggaagaggacaccaacgaccacuacccccaucugaaggccuaucuccuagaccaccuaauucaccuucaauuucaauuccaugcaugggcucuaaagccucaucaccacauggacuaggaucuccauuaguagcaucaccacgucuagagaaaagacuuggcggacuugcaccccaacgaggcucacgaauuucaguucuuucugccucaccaguaagugauguaucauacauguucgguuccucccaaucacuacuucacuccucaaauuccucccaccaaucuucaucacguucauuagaaagucccgcuaacucaucaucaucccuacauuccuuaggauccguuucucuguguacccgaccaucagauuuccaagcacccagaaaccccacuuuaacaaugggacagccuagaacuccacauucuccucccuuagccaaagaacaugccagcucuugcccaccaucaauuacaaauucaaugguagacauaccaaucguacuaauaaacggaugcccagaaccggguucaucucccccacaaagaacuccaggccaucaaaacucuguacaaccaggagcagccucuccaucuaauccauguccagccacaagaucaaauucacaaacacuaucugaugcuccuuucaccacuuguccagaaggaccugcccgcgacaugcaaccuaccaugaaauucgucauggauacaucuaaauacugguucaaacccaauauaacacgagaacaagcaauagaauuacuacguaaagaagaacccggcgcauuuguaauucgagacaguucaucauacagaggaucuuuuggacuagcuuuaaaaguucaagaaguaccugcaucagcucaaucaagaccuggagaagacucaaacgaucuaauaagacauuucuuaauagaaucuucagcaaaaggaguacaccucaaaggagcagaugaagaaccuuacuuugguucccucucagccuuuguaugucaacacucaauuauggcauuagcucucccaugcaaacuaaccauuccacaacgcgaacuagguggagcagauggggcaagugacuccacagacucuccagccucaugccaaaagaaaucagcaggaugucauacucuauaucuaucuucaguaucuguagaaacauuaacaggugccuuagcaguucaaaaagcaauaucaaccacauuugaacgugauauacuaccaaccccaacuguuguccacuucaaaguaacugaacaaggaauaacacuaacagauguucaaagaaaaguauuuuucagacgacauuacccacuaacaacucuaagauuuuguggaauggacccagaacaaagaaaauggcaaaaauauugcaaaccuuccuggauuuuugguuucguugcuaaaucccaaacugaaccacaagaaaacguaugucaucuauuugcagaauaugauaugguucaacccgcaucacagguaauuggauuaguaacagccuuacuucaagacgcugaaagaauguaa

SEQ ID NO: 3649 - RNA, 1302 nt, Artificial Sequence
  AAH06510 variant
auggcccuaagaguaacaagaaauucaaaaauaaacgcugaaaauaaagcaaaaauuaacauggcaggcgcaaaaagaguaccaacagcacccgccgcaacaucaaaacccggccuaagacccagaacagcacuaggugacauaggaaacaaaguaagcgaacaacuacaagcaaaaaugccaaugaaaaaagaagccaaaccaucagccaccggaaaaguaauagacaaaaaauuaccaaaaccacuagaaaaaguaccaaugcuaguuccaguaccaguaucagaaccaguacccgaacccgaaccagaacccgagccagaaccaguaaaagaagaaaaacuaucacccgaaccaauacuaguagacacagcaagcccuucaccaauggaaacaagcggaugcgcaccagccgaagaagaccuaugucaagcauucucagacguuauauuagcaguuaaugacguagaugcagaagacggagcagacccaaaucuaugcucagaauacguaaaagacauauaugcauacuuaagacaacuagaagaagaacaagccguaagacccaaauacuuauuaggcagagaagucacaggaaacaugagagcaaucuuaauagacuggcucguacaaguacaaaugaaauucagauuauuacaagaaacuauguacaugaccguaucaauaauagacagauucaugcaaaacaacugcguaccaaaaaaaauguuacaacuaguaggaguaacagccauguucauagccucaaaauacgaagaaauguaccccccagaaauaggugacuucgcauucguaaccgacaauacauauacaaaacaucaaauaagacaaauggagaugaaaauacuaagagcacuaaacuucggauuaggcagaccacuaccacuacacuuccugagacgagcaucaaaaauaggagaaguagauguagaacaacacacuuuagcaaaauauuuaauggaacuaacaaugcuagacuacgacaugguccacuucccaccaucacaaaucgcagcaggcgcauucugccuagcacuaaaaauacuagacaauggagaauggacaccaacauuacaacacuaccucucauacacagaagaaucauuacuuccugucaugcaacaucuagcaaaaaacguaguuaugguaaaucaaggacuaaccaaacacaugacaguaaaaaauaaauaugcaacuagcaaacacgcaaaaauaucaacccuaccccaacuaaacucugcacuaguacaagacuuagcaaaagcaguagcaaagguauaa

SEQ ID NO: 3650 - RNA, 888 nt, Artificial Sequence
  AAA58392 variant
auggagcaucaauuauuaugcugugaaguagaaacgaucagaagagcauacccagaugcaaacuugcuuaaugacagaguauuaagagcaaugcuaaaagcagaagaaacaugugcaccaaguguuagcuauuucaaaugcguacaaaaagaaguacuaccaagcaugagaaaaauaguagcaacauggaugcuagaaguaugcgaagaacaaaaaugcgaagaagaagucuuuccauuagcaaugaacuaucuagaucgauuucuaucacuagaaccagugaaaaaaaguagacuacaacuacuaggagcuacauguauguuuguagcgagcaaaaugaaagaaacaaucccacuaacagcagaaaaacuaugcauauacacagacaauagcauaagaccggaagaauuacuacaaauggaauuacuauuaguaaauaaauuaaaauggaauuuagccgcaaugacaccacaugacuuuauagaacauuuuuuaucaaaaaugccugaagcagaagaaaauaaacaaaucauaagaaaacacgcacaaacauucguagcauuaugcgcaacugaugucaaauucauaagcaauccaccgagcaugguagcagcaggaagcguaguagcagcaguacaaggacuaaaccuaagaagcccaaacaacuucuuaagcuacuacagacuaacucgauuuuuaucaagagugauaaaaugcgauccagauugccuaagagcgugccaagaacaaauagaagcccuauuagaaucaucauuaagacaagcacaacaaaacauggacccaaaagcagcagaagaagaagaagaagaagaagaagaaguagaucuagcaugcacaccaacugacguaagagacguagauauauaa

SEQ ID NO: 3651 - RNA, 651 nt, Artificial Sequence
  AAA36601 variant
augcuaagauuaagugaaagaaauaugaaaguauuacuagcagcagcauuaauagcaggauccguauucuuuuuauuacuaccagggccaagugcagcagaugaaaaaaaaaaaggaccaaaaguaacaguaaaaguauacuucgaccuaagaauaggagaugaagauguaggaagaguaauauuuggacuauucggaaaaacaguaccaaaaacuguagauaacuuuguagcacuagcaacaggagaaaaaggauuuggauauaaaaauagcaaauuucauagaguaauaaaagacuuuaugauacaaggaggagauuucacaagaggagacggaacaggaggaaaaucaauauauggagaaagauucccagacgaaaacuuuaaauuaaaacauuacggaccaggauggguaagcauggcaaaugcaggaaaagauacaaauggaagccaauuuuucauaacaacaguaaaaacagcaugguuggacggaaaacauguaguauucggaaaaguacuagaaggaauggaaguaguaagaaaaguagaaaguacaaaaacagauagcagagauaaaccauuaaaagaugucauaauagcagacuguggaaaaauugaaguagaaaaaccauucgcaauagcaaaagaauaa

SEQ ID NO: 3652 - RNA, 1044 nt, Artificial Sequence
  AAD10634 variant
augccuagaggacaaaaaucaaaauuaagagcaagggaaaaaagaaggaaagcaagagaagaaacacaaggacucaaaguagcacacgcaacagcagcagaaaaagaagaauguccaucaagcucgccaguacuaggagacacuccaacaagcucaccagcagcaggaaucccucaaaaaccucaaggugcaccacccacuacgacagcagcagcagcaguaaguuguacagaaagcgaugaaggagcaaaaugccaaggagaagaaaacgcaaguuucucucaagcaacaacaagcacagaaucaagcguaaaagauccaguagcaugggaagcaggaauguuaaugcacuuuauacuuagaaaauacaaaaugagagaaccaauaaugaaagcagauaugcuaaaaguaguggacgaaaaauauaaagaucacuuuacagaaauauuaaacggagcuucaagaagauuagaacuaguauucggauuagaucuaaaagaagauaauccaagcgggcacacauacacauuaguuuccaaauuaaauuuaacuaacgauggaaaucuaaguaacgauugggauuucccaagaaacggauugcuaaugccauuacuaggcguaauuuucuuaaaagguaacucagcaacagaagaagaaauauggaaauucaugaacguauuaggagcauacgacggagaagaacaccuaaucuauggagaaccaagaaaauuuaucacacaagaccuuguacaagaaaaauauuuaaaauaugaacaaguaccaaauagcgauccaccaagauaucaauuucuuuggggcccgcgagcauacgcagaaacaacaaaaaugaaaguauuagaauucuuagcaaaaaugaacggagcaacaccaagagacuucccaucacacuaugaagaagcauuaagagacgaagaagaaagagcacaaguaaggaguucaguaagagcaagacgaagaacaacagcaacaacauuuagagcgagaaguagagcaccauuuagcagaagcagucaucccauguaa

SEQ ID NO: 3653 - RNA, 2436 nt, Artificial Sequence
  BAF91373 variant
auggaaucacaaggaguuccacccggaccauauagggcaacaaaacuuuggaacgaagucacaacaucauuuagggcaggaaugccucuacgcaaacacagacaacauuucaaaaaauacggaaacugcuuuacagcaggagaggccguugacuggcuguaugaucuacuacgaaauaauagcaacuucggcccagaagucacuagacaacaaacaauacaacuauuaaggaaauuccuaaaaaaccauguuauagaagacauaaaagguagauggggauccgaaaacguugaugacaacaaucaguuauuccguuucccugcaacuuccccccucaaaacauugccccgacgcuauccugaacuaagaaaaaacaauauagaaaauuuuuccaaagacaaagacucaauauuuaaauuaagaaaccuaagccgaagaacgccaaaacgccacggacuacauuuaucccaagaaaauggagaaaaaauaaaacacgaaauaauaaacgaagaccaagaaaacgccauugacaacagagaauuaucucaagaagaugucgaagaaguuuggagauauguaauccuaauuuaccuucaaacaauacuaggagucccuucacucgaagaaguaauaaauccuaaacaaguaauaccccaauauaucauguacaauauggcaaauacuuccaagcgcggaguaguuauacuucaaaacaaauccgacgaucuuccacacuggguacuauccgcuaugaaaugcuuagcaaacuggccacgaucaaaugacaugaacaacccuacauauguaggcuucgaacgagauguauuccgaacaaucgccgacuacuuccuagauuuacccgaaccccuauuaacuuuugaauacuaugaauuauucguuaacauacucguaguuuguggcuauauaacagucucggauagauccaguggaauacauaagauacaagacgacccccaaucaucaaaauuccugcauuuaaauaaccuaaacucauucaaaucgacagaaugccucuuacuaucauuacugcaccgugaaaaaaauaaagaagaauccgacucaacagaacgauuacaaauuucaaaccccggauuccaagaaagaugugcuaaaaaaaugcagcuaguaaaucuuagaaauagacgcgucucagcaaacgacauaaugggaggaucaugccacaauuuaauaggucuaucaaacaugcaugaucuuucaucgaauucaaaaccacgcugcugcucacuugaaggaauaguugacguaccuggcaacagcaguaaagaagcauccucuguguuucaccaaucuuucccuaauauagaaggacaaaacaacaaacuauuucuagaaucaaaaccuaaacaagaauuccuccuaaaccuacacucugaagagaauauacaaaaaccauucuccgccggcuucaaaagaacaucaacacuuacaguacaagaucaggaagaacuuugcaacggaaaaugcaaauccaaacaacugugccgcucacaaucacucuuauuaagauccucaacaagacguaacucauauauuaauacacccguagccgaaauaauuaugaaaccaaacguaggccaaggaucaacaucuguacagacagcuauggaaucugaacuaggagaaagcagcgcaaccauaaauaaacgauuaugcaaaucaacaauagaauuaagugaaaacuccuuauuaccagcuucaucaaugcucacaggaacccaauccuuacuacaaccacaccuagaaagaguagcuauugaugcacuacaacuuugcugcuuacuacuaccaccuccaaauagacgcaagcuacaacuacucaugaggaugauauccagaaugucacaaaacguagacaugcccaaacuacaugaugccaugggaacacgaucauuaaugauacacacauucuccagaugcguccuguguugugcagaagaaguagaucuagacgaacucuuagccgguagauuaguaucauuuuuaauggaccaccaccaagaaauacuacaaguccccucauaucuacaaacagcagucgagaaacaucuagauuaccuaaaaaaaggacacaucgaaaaucccggagacggacuguucgcuccacuaccgaccuauucauacuguaaacaaauaucugcccaagaauuugaugaacaaaaaguuuccacaucccaagcagcaauagcagaacuccuugaaaacauaaucaaaaauagauccuuaccucuaaaagaaaaaagaaaaaaauuaaaacaauuucaaaaagaauacccccuaaucuaucaaaaaagauuuccaacaacagaauccgaagcugcauuauucggagauaaacccaccauuaagcaacccaugcuaauucuacgcaaaccgaaauucagaucacuucgcuag

SEQ ID NO: 3654 - RNA, 297 nt, Artificial Sequence
  AAA46940 variant
augcacggagacacaccaacauuacacgaauacaugcuagaccuacaaccagaaacaacagacuuauacuguuacgaacaauuaaacgacagcucagaagaagaagacgaaauagacggaccagcaggacaagcagaaccagacagagcacacuauaacauaguaacauucuguugcaaaugcgacagcacacuaagacuauguguacaaagcacacacguagacauaagaacauuagaagacuuacuaaugggaacauuaggaauaguaugcccaauaugcagccaaaaaccauaa

SEQ ID NO: 3655 - RNA, 318 nt, Artificial Sequence
  AAA46947 variant
augcacggaccaaaagcaacauuacaagacauaguacuacaccuagaaccacaaaacgaaauaccaguagaccuacuaugccacgaacaacuaucagacucagaagaagaaaacgacgaaauagacggaguaaaccaccaacaccuaccagcaagaagagcagaaccacaaagacacacaaugcuaugcaugugcugcaaaugcgaagcaagaauaaaacuaguaguagaaucaucagcagacgaccuaagagcauuccaacaacuauuccuaaacacacuaucauucguaugcccauggugcgcaucacaacaauaa

SEQ ID NO: 3656 - RNA, 297 nt, Artificial Sequence
  AAA46951 variant
augagaggagaaacaccaacacuacaagacuacguacuagaccuacaaccagaagcaacagaccuacacugcuacgaacaacuaccagacucaucagacgaagaagacguaauagacucaccagcaggacaagcagaaccagacacaucaaacuacaacauaguaacauucugcugccaaugcaaaucaacacuaagacuaugcguacaaucaacacaaguagacauaagaauacuacaagaacuacuaaugggaucauucggaauaguaugcccaaacugcucaacaagacuauaa

SEQ ID NO: 3657 - RNA, 294 nt, Artificial Sequence
  AAA46959 variant
augagaggacacaaaccaacacuaaaagaauacguacuagaccuauacccagaaccaacagaccuauacugcuacgaacaacuaucagacucaucagacgaagacgaaggacuagacagaccagacggacaagcacaaccagcaacagcagacuacuacauaguaacaugcugccacacaugcaacacaacaguaagacuaugcguaaacucaacagcaucagaccuaagaacaauacaacaacuacuaaugggaacaguaaacauaguaugcccaacaugcgcacaacaauaa

SEQ ID NO: 3658 - RNA, 300 nt, Artificial Sequence
  AAA46967 variant
augcacggagaaauaacaacacuacaagacuacguacuagaccuagaaccagaagcaacagaccuauacugcuacgaacaacuaugcgacucaucagaagaagaagaagacacaauagacggaccagcaggacaagcaaaaccagacacaucaaacuacaacauaguaacaucaugcugcaaaugcgaagcaacacuaagacuaugcguacaaucaacacacauagacauaagaaaacuagaagaccuacuaaugggaacauucggaauaguaugcccaggaugcucacaaagagcauaa

SEQ ID NO: 3659 - RNA, 330 nt, Artificial Sequence
  AAA47051 variant
augagaggaccaaaaccaacacuacaagaaauaguacuagaccuaugcccauacaacgaaauacaaccaguagaccuaguaugccacgaacaacuaggagaaucagaagacgaaauagacgaaccagaccacgcaguaaaccaccaacaccaacuacuagcaagaagagacgaaccacaaagacacacaauacaaugcucaugcugcaaaugcaacaacacacuacaacuaguaguagaagcaucaagagacacacuaagacaacuacaacaacuauucauggacucacuaggauucguaugcccauggugcgcaacagcaaaccaauaa

SEQ ID NO: 3660 - RNA, 321 nt, Artificial Sequence
  CAA52574 variant
augcauggaccaagagaaacauuacaagaaauaguacuacaucuagaaccacaaaacgaacuagauccaguagacuuacuauguuacgaacaauuaagcgaaagcgaagaagaaaacgaugaagcagacggaguaucacacgcacaauuaccagcaagaagagcagaaccacaaagacauaaaauacuauguguauguugcaaaugcgauggaagaauagaacuaacaguagaaagcucagcagaagacuuaagaacacuacaacaauuauucuuaagcacacuaucauucguaugcccauggugugcaacaaaccaauaa

SEQ ID NO: 3661 - RNA, 306 nt, Artificial Sequence
  M62877.1 variant
augagaggaaauguaccacaauuaaaagauguaguacuacaucuaacaccacaaacagaaauagaucuacaaugcuaugaacaauucgauucaucagaagaagaagaugaaguagacaauaugagagaccaacuaccagaaagaagagcaggacaagcaacaugcuauagaauagaagcaccauguugcagaugcaguagcguaguacaacuagcaguagaaagcucaggagauacauuaagaguaguacaacaaaugcuaaugggagaacuaucacuaguaugcccaugcugugcaaauaacuaa

SEQ ID NO: 3662 - RNA, 300 nt, Artificial Sequence
  CAA52586 variant
augagaggagacaaagcaacaauaaaagacuacauacuagaccuacaaccagaaacaacagaccuacacugcuacgaacaacuaggagacucaucagacgaagaagacacagacggaguagacagaccagacggacaagcagaacaagcaacaucaaacuacuacauaguaacauacugccacucaugcgacucaacacuaagacuaugcauacacucaacagcaacagaccuaagaacacuacaacaaaugcuacuaggaacacuacaaguaguaugcccaggaugcgcaagacuauaa

SEQ ID NO: 3663 - RNA, 318 nt, Artificial Sequence
  CAA52597 variant
augcacggaaaaguaccaacacuacaagacguaguacuagaacuaacaccacaaacagaaauagaccuacaaugcaacgaacaacuagacucaucagaagacgaagacgaagacgaaguagaccaccuacaagaaagaccacaacaagcaagacaagcaaaacaacacacaugcuaccuaauacacguaccaugcugcgaaugcaaauucguaguacaacuagacauacaaucaacaaaagaagaccuaagaguaguacaacaacuacuaaugggagcacuaacaguaacaugcccacuaugcgcaucaucaaacuaa

SEQ ID NO: 3664 - RNA, 297 nt, Artificial Sequence
  AAF13691 variant
augagaggaaacaacccaacacuaagagaauacauacuagaccuacacccagaaccaacagaccuauucugcuacgaacaacuaugcgacucaucagacgaagacgaaauaggacuagacagaccagacggacaagcacaaccagcaacagcaaacuacuacauaguaacaugcugcuacacaugcgacacaacaguaagacuaugcauaaacucaacaacaacagacguaagaacacuacaacaacuacuaaugggaacaugcacaauaguaugcccaucaugcgcacaacaauaa

SEQ ID NO: 3665 - RNA, 324 nt, Artificial Sequence
  ACL12335 variant
augcacggaccaaaagcaacacuaugcgacauaguacuagaccuagaaccacaaaacuacgaagaaguagaccuaguaugcuacgaacaacuaccagacucagacucagaaaacgaaaaagacgaaccagacggaguaaaccacccacuacuacuagcaagaagagcagaaccacaaagacacaacauaguaugcguaugcugcaaaugcaacaaccaacuacaacuaguaguagaaacaucacaagacggacuaagagcacuacaacaacuauucauggacacacuaucauucguaugcccacuaugcgcagcaaaccaauaa

SEQ ID NO: 3666 - RNA, 318 nt, Artificial Sequence
  AAA79500 variant
augcacggaaaaguaccaacacuacaagaaguaauacuagaacuagcaccacaaacagaaauagacuuacaaugcaacgaacaacuagacucaagcgaagacgaagacgaagacgaaauagaccaccuacuagaaagaccacaacaagcaagacaagcagaacaacacaaaugcuaccuaauacacguaccaugcugcaaaugcgaauuaguaguacaacuagacauacaaagcacaaaagaagaacuaagaguaguacaacaacuacuaaugggagcacuaacaguaacaugcccacuaugcgcaucaagcaaauaa

SEQ ID NO: 3667 - RNA, 1392 nt, Artificial Sequence
  AAF80488 variant
auggguaaagaaaaaacucacauaaauauagucguaauaggacacguggacucaggaaaaagcacaacaacuggacauuuaauauauaaaugcgguggaauagacaaaagaacaaucgaaaaauuugaaaaagaagcagcagaaauggguaaaggaagcuuuaaauaugcauggguucuagacaaauuaaaggcagaaagagaaagaggaaucacuauagauauaagucuauggaaauuugaaacaacaaaauauuauauaacaauaauagacgcaccaggacacagggauuuuauaaaaaacaugauaacaggcacaagccaagcagacugcgcaguauuaauaguggcagccggaguaggagaauuugaagcaggcauaucaaaaaauggacaaacaagagaacaugcacucuuagcauauacauuagguguaaaacaauuaauaguuggcgucaacaaaauggacucaacagaacccgcauacagcgaaaaacgauaugaugaaauaguaaaagaaguaucagcauauauaaaaaaaauagguuauaauccagcaacaguaccauuuguaccuauaucaggcuggcauggugacaauaugcuagaacccaguccaaacaugccaugguuuaaaggauggaaaguagaaagaaaagaaggaaacgccucaggaguuucauuacuagaagcguuagacacaauauuaccaccgacaagaccaacagacaaaccauuaagauuaccauugcaagacguauauaaaauaggcgggauaggaaccguaccaguagguaggguagaaacaggaaucuuacgaccagguaugguaguaacauuugcaccuguaaauauaacuaccgaaguaaaaagcguagaaaugcaucaugaagcacuaucagaagcacuaccaggagacaacguagguuuuaauguuaaaaauguauccguaaaagauauaaggagaggaaacguauguggcgauucaaaaagugauccaccacaagaagccgcacaauucacaucacaaguaauaauauuaaaucacccaggccaaauaucggcaggauacaguccaguaauagacugccauaccgcacauauagccugcaaauuugcagaauuaaaagaaaaaauagacagaagaaguggaaaaaagcuagaagauaaucccaaaucacuaaaaaguggagaugcagccauaguagaaaugguaccaggaaaaccuaugugugucgaaucauucagccaauauccaccacuagggagauucgcaguaagagacaugagacaaacaguagcuguagguguaauaaaaaaugucgaaaaaaaaucaggaggagcaggaaaagucacuaaaagcgcacaaaaagcacaaaaagcaggaaaauaa

SEQ ID NO: 3668 - RNA, 2919 nt, Artificial Sequence
  EAW51573 variant
auggauacagauuuauaugacgaauuugguaauuauauuggucccgaacuagauucagacgaagacgacgaugaacucggcagggaaaccaaagaucuugacgaaauggacgacgaugaugaugaugaugauguaggagaccaugacgaugaucauccagggauggagguagugcuacacgaagauaagaaauauuauccuacagcagaagaaguauauggccccgaaguagaaacaauaguacaagaggaagauacacaaccuuuaaccgaaccaauaaucaaaccagucaaaacaaagaaauucacuuuaauggaacaaacacuaccuguuaccgucuaugaaauggauuuccuagccgauuugauggauaacagugaguuaauaagaaauguaacacuauguggccaccuacaucaugguaaaaccuguuucgucgauugccuuauugaacaaacucaucccgaaauaagaaaaagauaugaccaagaucuauguuacacagauauauuauuuacagaacaagaaagaggagucgguauaaaauccacaccaguaacaguaguacuaccugacaccaaaggaaaaagcuaccuauuuaauauaauggauacaccaggacauguuaacuuuagugaugaagucaccgcaggccuccgaauaucagauggugucguacuauucauagaugcagcugaaggaguaauguuaaacacagaaagauuaauaaaacaugcaguacaagaaagacuggcaguaacuguauguauaaacaaaauugaccgauuaauauuagaauuaaaauuaccaccaaccgaugcauauuauaaauuacgacauauaguugaugaaguaaacggauuaauuaguauguacuccacagacgaaaaccuaauccuaucaccauuacuaggaaacgucuguuucucuucuucccaauauaguauauguuucacacucggcuccuuugcaaaaauauacgcggauacuuuuggagauauuaauuaccaagaguucgcaaaacgucuuuggggagacauauauuucaauccaaaaacgagaaaauuuaccaagaaagccccaacuagcucaucacaaagaucauuuguugaauuuauacuagaaccacuauacaaaauucuagcacaaguugucggugauguugauacaaguuuaccucgaacuuuagaugaauuaggaauacauuuaacaaaagaagaacuaaaauugaauauccgaccacucuuacgacucguaugcaagaaauucuucggagaauuuacaggguucguugauaugugcguucaacauauacccucuccaaaaguaggugcaaaaccaaaaauagaacauacauauacaggcgguguagauucagaucuaggugaagcaaugucagacugugauccagaugguccacuuaugugccauaccacuaaaauguacuccaccgacgauggaguucaauuccaugcauuugguagaguacuuaguggaacaauacaugccggccagccagucaaaguucuaggagaaaauuauaccuuagaagaugaagaagauucacaaauaugcacugucggacgcuuauggauaucaguagcaagauaucauauagaaguuaauagaguaccagcaggaaauuggguauuaauagaaggagucgaccaaccaauaguaaaaacagcaaccauaacagaaccgcgaggcaaugaagaagcucaaauuuucagaccauuaaaauucaacacuacaagcguaauaaaaauugccgucgaaccaguaaauccuucagaauuaccaaaaauguuagauggcuuaagaaaaguaaacaaaucauacccauccuuaacaacuaaaguagaagaaaguggagaacaugucauauuaggaacuggagaacuauauuuagauugugugaugcaugauuugagaaaaauguacagcgaaauagauauuaaagucgcugauccuguaguuaccuucugugaaacaguuguagaaacaaguucgcuaaaauguuucgcagaaacuccaaauaagaaaaauaaaauaacuaugauagcagaaccauuagaaaaaggauuagcagaagauauagaaaacgaaguuguccaaaucacguggaacagaaagaaauuaggugaauuuuuccagacaaaauacgauugggaucuucuagcagcaagaagcauuugggcauuuggaccagaugcaacaggaccaaauauccuaguagaugacacucuacccuccgaaguagacaaagcacucuugggaucaguaaaagauucaauaguucaaggauuucaauggggaacaagagaaggaccacuaugcgaugaacugauuagaaauguaaaauuuaaaauauuggaugccguaguugcacaagaaccccuacauagaggaggcggccaaauaauaccaaccgcaaggcguguaguuuacagugcauuuuuaauggcaacaccuagacuaauggaaccauauuauuuugucgaaguccaagccccugcagauuguguuucugcaguauauacagucuuagcacgaagaagaggacaugucacacaagaugcaccuauacccggaucaccauuguacacgauuaaggcuuuuaucccagcaaucgauucauuuggcuuugaaacugaucuacguacucauacacaaggacaagcguuuucgcuaucaguuuuucaucauuggcaaauuguaccuggagacccccuugauaaauccauuguaauaaggccacuagaaccacaacccgccccacaccuagcacgugaauuuaugauaaaaacaagaagaagaaaaggacuaucagaagauguauccauauccaaauucuuugaugauccaaugcuauuggaacuagcuaaacaagaugucguucuaaauuauccaauguaa

SEQ ID NO: 3669 - RNA, 1971 nt, Artificial Sequence
  EAW50963 variant
augagaccaucaggcacagcuggcgcagcauuauuagcauuacuagcagcauuauguccagcaucaagagcacuagaagaaaaaaaaguaugucaaggaacgagcaauaaauugacacaauuaggcacauuugaagaccacuuccuaucauuacaacgaauguucaacaauugugaaguaguauuaggaaacuuagaaauaacuuacguacaaagaaauuacgaccuaaguuuucuuaaaacuauucaagagguagcaggauacguuuuaaucgcuuuaaacacaguagagcgaauaccauuagaaaacuugcaaauaauuagaggaaauauguauuacgaaaauucuuaugcuuuagccguauuaucaaacuacgaugcaaacaaaacaggccuaaaagaauuaccaaugaggaacuuacaagaaauuuugcauggagcaguacgauuuaguaauaaccccgcacuauguaauguagaauccauacaauggagagauauagugucaucagacuucuuaaguaacaugucaauggauuuucaaaaucaccuaggaucaugccaaaaaugcgacccaagcugcccaaaugguucauguuggggagcaggagaagaaaauugccaaaaauugacaaaaauaauaugugcucaacaaugcucaggaagaugcagaggaaaaagcccuucggauugcugucauaaccaaugugccgcuggaugcacaggaccaagagaaagugauuguuuaguauguagaaaauuucgcgaugaagcaacgugcaaagacacaugcccuccauuaaugcuauacaacccaacaacauaucaaauggauguaaaucccgaaggaaaauacaguuuuggagcaacaugcguaaaaaaauguccaagaaauuauguuguaacagaucauggaagcuguguacgcgcaugcggagcagauucauaugaaauggaagaagauggaguccgaaaaugcaaaaaaugugaagguccgugucgaaaaguaugcaauggaauagggauuggagaauucaaagauagcuuaagcauaaacgcaacaaauauaaaacacuuuaaaaauugcacaagcauaucaggagaucuucauauucucccaguagcauuuagaggagauagcuucacacacaccccuccauuagacccacaagagcucgauauucuaaaaacaguaaaagaaauaacagguuuucuauuaauacaagcauggccagaaaaucguacagaucuucacgcauuugaaaaucuagaaauaauucgaggaagaaccaaacaacacggacaauucucauuagcaguaguaucauuaaauauaacaucacuaggccuaagaucacuaaaagaaauaagugauggagacguaauaauaucugguaauaaaaaucuauguuaugccaacacaauaaauuggaaaaagcuauucggaacaagcggccaaaagaccaaaauaauaagcaauagaggagaaaauaguugcaaagcaacaggacaaguuugucacgcacuaugcagcccugaaggauguuggggcccagaaccacgagauugcguuagcugucgcaauguaucaagagguagagagugcguagauaaauguaauuuauuagaaggagaaccgcgagaauuuguagaaaacagcgagugcauacaaugucacccagaaugccuaccacaagcaaugaauauaacauguacaggaagaggaccagacaacuguauucaaugugcacacuacauagauggaccccacugcguaaaaacuugcccagcaggaguaaugggugaaaauaauacauuaguauggaaauaugcugaugcaggacauguaugccauuuaugucacccaaacuguacauauggauguacaggaccgggauuagaaggaugucccaccaacggaucauauaucguuagucauuuuccuagaucauucuacaaaaugagcguacau

SEQ ID NO: 3670 - RNA, 3411 nt, Artificial Sequence
  ADL28125 variant
augcgaccaucaggcacagcaggggcagcguuauuagcuuugcucgcugcccuuuguccagcaaguagagcauuagaggaaaagaaaguaugucaagggacaucuaauaaacuaacucaacuuggaaccuucgaggaccauuucuuguccuuacagaggauguucaauaacugugaaguugucuuaggcaaccucgaaauaacguacguacaacgaaauuaugaccuaaguuuucucaaaacaauacaagaagucgccgguuauguauuaauugcguuaaacacagucgaacgaauaccauuagaaaaucuccaaaucauuagaggaaauauguacuaugaaaauagcuaugcuuuagcaguauuaucaaacuacgaugccaauaaaacaggacuaaaggaacucccaaugagaaauuuacaagaaauauuacacggagccguacgcuuuucaaacaauccagcauuaugcaacguugaaaguauucaauggagagacauagucagcucagacuuuuuauccaacauguccauggacuuccaaaaccaucuuggaucuugucagaaaugugauccaaguugucccaaugguucuuguuggggugcaggagaagaaaacugccaaaaacuaacuaaaaucauaugcgcacaacaaugcagcggacguuguagagggaagucuccuuccgacuguugccauaaccaaugugcagcaggcugcacaggcccucgagaaagugauuguuuggucugccgcaaguuuagagaugaagcuacaugcaaagacacauguccaccauuaaugcuauauaacccaaccacauaucaaauggauguaaaucccgagggaaaauacucauucggagccacgugcguuaagaaauguccaagaaacuauguaguuacagaucauggaucauguguucgagccugcggagcggauagcuacgagauggaagaggauggugucagaaaauguaagaaaugcgaaggaccauguagaaaaguuuguaauggaauaggaauuggcgaauuuaaagauucacucucgauaaaugcuaccaauauaaaacauuuuaaaaauugcacuucuaucucgggagaccuacacauauuaccgguagcauucagaggugauagcuuuacgcacacaccaccuuuagauccccaagaacuagacauauuaaaaacuguaaaagaaauaacaggguuuuuauuaauacaggcuuggcccgagaaucgaaccgauuuacaugcauucgaaaaucuugaaauaauuagaggaagaacuaaacaacacggacaauuuuccuuagcaguaguuagccuaaauauaacaucacucggauuaaggucacuuaaagaaauaagcgauggggauguaauaauaagugguaauaaaaaucucugcuaugcaaauacgauaaauuggaagaaacucuucggaaccucuggacagaaaacaaaaaucauaucaaauagaggagaaaauucauguaaagcgacaggacaaguuugccacgcucuaugcucaccagagggaugcuggggucccgaaccccgagauuguguuucaugccgaaauguuagccgagguagggaauguguagauaaaugcaaccuuuuagaaggagaaccucgggaguucguagaaaauuccgaaugcauccaaugucauccugaaugcuuaccacaagcaaugaauaucacuuguacaggaagaggucccgacaauugcauccaaugugcucauuauauagauggcccgcacuguguaaaaacauguccggccggagucaugggggaaaauaauacauugguauggaaauacgcagaugccgggcacguuugucauuuaugucacccaaauugcacauauggauguacaggaccaggucuugaaggauguccaacaaacggaccaaaaaucccaaguauagcaacaggaauggugggagcacuacuucuucuuuuaguuguagcauuaggaauaggucuuuuuaugagaagacgacauaucguuagaaaacgaacuuuacgucgccucuuacaagagagagaauuaguagaaccgcuaaccccaucuggagaagcaccaaaucaagcauuacuaagaauacucaaagaaacagaauuuaagaaaauaaaaguacuaggaucaggcgcauuugggacaguauacaaagggcuuuggauaccugagggagagaaaguaaaaauaccaguagcaauuaaagaacuacgagaagcaacaaguccuaaagcaaacaaagagauccuagaugaagcauauguaauggcaaguguagauaacccacauguauguaggcuacuagggauuugcuuaacuucaacuguucaauuaauuacacaacuaaugccauucggaugccuacuagacuauguacgagaacauaaagauaacauagguucccaauaucucuuaaacugguguguucaaauagcaaaaggaaugaauuaucucgaagauagaagacuuguacaccgagaccucgcagcuagaaauguauuaguaaaaaccccacaacacguaaaaauaacagacuuuggacuagcgaaacuauuaggcgcugaagaaaaagaguaccaugcagaaggagguaaaguaccaaucaaauggauggcgcuagaaagcaucuuacauaggauauacacacaucaaagcgacguauggucauacggaguaacaguaugggaauuaaugaccuuuggcucaaaaccauaugacggcauacccgcuagugaaaucucaucaauacuugaaaaaggugaaagauuaccgcaaccuccaauauguacaauagauguauauaugauaaugguaaaauguuggaugauugaugcagacucuagaccaaaauuccgagaacuaauaaucgaauuuuccaaaauggcaagagauccacaaagauacuuaguaauccagggagacgaaagaaugcaccuaccguccccuacagauucaaauuucuauagagcccuuauggacgaagaagauauggaugacguaguugacgcggaugaauaccuaauuccacaacaaggauucuuuucuucaccguccacaucaagaacaccacuacuaagcagucuaucagcaacaaguaacaacuccacaguugcuuguauagaccguaacggucuucagucuugcccaauaaaagaggacucauuuuuacaaagguauucuucagauccuacaggcgcauugacagaagacucuauagacgacacauuucuaccuguccccggcgaauggcuuguauggaagcaaucuuguucaagcacaagcucuacacacucagcagcugcaucacuucaauguccaucacaggucuuaccaccagcaucuccagaaggagagacaguagcagaccuucaaacucaauaa

SEQ ID NO: 3671 - RNA, 150 nt, Artificial Sequence
  CCO13722 variant
augugcgcaaccugcgccauacaaaccgccccaaccggcccaaacaaaucaucacucucagacuucucacuaccacuaaaacuacacuuccucucaaccauaucaauaucaccauucgccucaaacaaaguacuaacacuauucaucuaa

SEQ ID NO: 3672 - RNA, 1218 nt, Artificial Sequence
  CCDS47587.1 variant
augagaccaucaggaacagccggagcagcacuauuagccuuauuagcagcauuauguccagcaucaagagcacuagaagaaaaaaaaguaugccaaggaacaucaaacaaauuaacacaacuuggaaccuuugaagaccacuuuuuaucacuacaacgaauguuuaacaauugugaaguaguccuaggaaaccuagaaauaacauauguacaaagaaacuaugacuuaucauucuuaaaaacaauacaagaggucgcaggcuauguacuaauagcacuaaauacuguagaaagaauaccauuagaaaaccuacaaauaauuagaggaaauauguacuacgaaaacucuuacgcacuagcagucuuaucaaacuacgacgccaauaaaacaggucuaaaagaacucccaaugagaaaccuacaagaaauauuacauggagccguaagauucagcaauaacccagcacuaugcaacguagaaucaauacaauggcgagauauaguauccagugacuuucuaucaaacaugagcauggacuuucaaaaccaccuaggaucaugccagaaaugugacccuucauguccaaacggaucaugcuggggugcaggagaagaaaauugccaaaaacuaacaaaaauaauaugcgcacaacagugcucaggaagaugcagaggaaaaucaccaucagauugcugucauaaccaaugugcagccggaugcacaggaccacgagaaucagauugcuuaguaugcagaaaauuuagagaugaagcaacaugcaaagauacaugcccaccacuuaugcuauauaauccuacaacauaccaaauggauguaaauccagaaggaaaauacucguucggagccacaugcguaaaaaaaugcccaagaaacuacguaguaacagaccacggcucaugcguaagagcaugcggagccgacagcuaugaaauggaagaagacgggguaaggaaauguaaaaaaugcgaagguccauguagaaaaguaugcaacggaauaggaauaggugaauucaaagacucacuuucaauaaaugcaacaaacauaaaacauuucaaaaacuguacaucaauuucaggugaccuacauauauuaccaguagccuucagaggagauucuuucacacacacaccuccacuagauccucaagaacuugauauacuaaaaacuguaaaagaaauaacaggacuaucauaa

SEQ ID NO: 3673 - RNA, 3633 nt, Artificial Sequence
  AAG35789 variant
augcguccauccggaacagccggugccgcacuacuugcacuucuagcugcucuauguccagcaucgagagcucucgaagaaaagaaaguaugucaaggcacaucuaacaaauuaacacaacugggaacguuugaagaccauuuccucagcuuacaacgaauguucaauaauugugagguaguauuagguaaucuagaaauaaccuauguacagcguaauuacgacuuaucuuucuuaaaaacaauacaagaagucgcaggguauguauuaauugccuuaaacacaguagaaagaaucccgcuagaaaaucuacaaauuauacgugguaacauguauuaugaaaauagcuaugcuuuggcaguacugucuaauuaugacgcaaauaaaacuggauuaaaagagcuaccaaugaggaacuuacaagaaauacuacacggagcagucagauuuagcaacaacccugcauuauguaauguagaaucaauucaauggcgagauauaguaaguucugauuucuuaucuaauaugagcauggauuuucaaaaucacuuagguaguugucaaaaaugcgauccauccugcccaaacgguagcuguuggggagcaggagaagaaaauugucaaaaacuaaccaaaaucauaugcgcucaacaauguucagguagaugccgagguaaaucacccagugauuguugucauaaucaaugcgccgcgggaugcacaggcccaagagaaucagauuguuuaguaugcaggaaauucagagacgaagcuaccuguaaagauacuugcccaccgcuuaugcuauauaaucccacaacauaccaaauggacguuaacccagagggaaaguacucguucggagcgaccugcguuaagaaaugcccuagaaauuacgucgucacagaucaugguagcugcguaagagcaugcggagcagauucuuacgaaauggaagaggacggaguaagaaaauguaagaaaugugaaggaccauguagaaaaguuugcaauggaauaggcauaggagaguucaaagauucacucucaauuaaugcuacuaauauaaaacauuucaaaaacuguacaucuauuucaggagaccugcauauacucccagucgcauucagaggggacucuuuuacccacacucccccauuggacccacaagaauuagacauccuuaaaacaguuaaagaaauuacuggauucuuacuuauacaagcauggccagaaaauagaacagaucuacaugcauucgaaaaucuugaaauaaucagaggacgaacuaaacaacauggacaauuuagccuagcagucguuucuuuaaauauaacaagccuuggcuuaaggucccuaaaagagauauccgauggagaugucauaauaucaggcaauaaaaaccuaugcuaugcuaauacaaucaauuggaagaaauuauuugguacaucaggacagaaaacaaaaauuauaucaaaccgcggugaaaacucauguaaagccacaggacaaguaugucaugcauuaugcagcccagaggguuguuggggcccagaaccacgggauugcgugaguugucgaaacguaaguagaggccgagaaugcguagauaaauguaaucuuuuagaaggugagccgagagaguucguagaaaacucugaauguauacaaugccauccagaauguuuaccacaagcuaugaauauaacaugcacaggaagagggccagacaauuguauucaaugcgcucauuauauugacgguccucacugcgucaaaacaugcccugcaggaguaaugggugaaaacaauacgcuaguauggaaauacgcugacgcaggacauguaugccaucuaugucacccaaauuguacauauggcuguacaggaccuggccuagaaggaugcccgacaaauggacccaaaauaccuaguauagcaacuggcaugguaggagcacuacucuuacuauuagucgucgcacugggcauagguuuauuuaugagacguagacauaucguucgaaaacgaacacuaaggcgguuacuacaagaaagagaauuaguugagccacuaaccccaaguggugaagcaccaaaccaagcauuauuacgaauuuugaaagaaacugaauuuaagaaaauaaaaguuuuaggaucaggugcauuugguacaguauacaaaggguuauggauaccagaaggcgaaaaagucaaaauuccaguugccauaaaagaguuacgggaagcuacaucuccaaaagcaaauaaagaaauauuagaugaagcauacguaauggcuaguguagacaauccucacguuugcagauuacuuggaauaugccuuaccuccaccguccaacuaauaacgcaacuaaugccauuuggaugucuuuuagacuacguucgagaacacaaagauaauauugggucccaauaucuacuaaacugguguguucaaauagcuaaaggaaugaauuauuuagaagauagaagauuagugcaucgagaucucgcggcgagaaacguccuugugaaaacuccacaacauguuaaaauaacagauuuuggauuagcaaaacuauuaggugcggaagaaaaagaauaccaugccgaaggcgggaaaguaccaaucaaauggauggcacucgagucaauuuuacacagaauuuauacucaucaaucagauguauggaguuauggaguuacugucugggaauuaaugacauucggcagcaaacccuaugacgggauaccagcuagugaaauaagcucaauauuagaaaaaggagaaagacuuccacaaccaccuaucuguacuauagacguauauaugauaauggucaagugcuggaugauugaugcugauucaagaccuaaauucagagaauuaauaauugaguucucaaaaauggcaagagacccacaaagguaucucguaauucaaggagacgaaagaaugcaucuuccaaguccaaccgauuccaauuuuuaucgcgcauuaauggacgaagaagacauggacgacguaguagacgccgaugaauaccucauuccucaacaaggauucuuuucaaguccaucaacaagucgcacucccuuauuaagcucacuaagugcuaccucaaacaauucaacaguagcuuguauagaucgaaacggacuucaaaguugucccauaaaagaagauucauuuuuacaacgauacuccucggacccuacaggagcauuaacugaagauucuauagaugacacauuucuaccaguaccugaauauaucaaccaaucaguacccaaaagaccagcaggaucuguacaaaaucccgucuaucauaaucaaccucuuaauccagcaccaagucgagauccacauuaccaagauccacacucgacagcaguaggaaacccugaguauuuaaauacuguacaaccaacuuguguaaauagcacguuugauaguccagcacauugggcacaaaaaggaagucaccaaauaucacuagauaaccccgauuaucaacaagauuucuuuccaaaggaagcaaaaccaaacggaauauuuaaagguagcacagcagaaaaugcagaauaucuacgcgucgcaccccaauccuccgaauuuauaggagcauag

SEQ ID NO: 3674 - RNA, 1395 nt, Artificial Sequence
  AAI18666 variant
auggcugcagaagacguaauaauaugugcacaacaaugcucaggccgaugucgaggaaaaaguccaucugauuguugucauaaccaaugugcggcaggauguaccggaccuagagaaagugacugccuaguauguagaaaauuuagagaugaagcaacauguaaagauacauguccaccauuaaugcuauauaauccaacaacauaccaaauggauguaaauccagaagggaaauauaguuucggggcaacauguguuaaaaaauguccaagaaauuacgugguaacagaucauggaucguguguacgagcauguggagcugauaguuaugaaauggaagaagacggaguaagaaaaugcaaaaaaugugaagguccauguagaaaagucuguaauggaauaggaauaggagaauuuaaggacucucuaaguauaaaugcaacaaauauaaaacauuuuaaaaauuguacaucaauaagcggugaucuacauauacuaccuguagcauuucgaggagauucauuuacacacacaccaccauuagauccacaagaauuagacauuuuaaaaacuguaaaagaaauaacagguuuccuauugauccaagcauggccagaaaacagaacagauuuacaugcauuugaaaaucuggaaaucauaagaggaagaacaaaacaacauggacaauuuucuuuagcaguuguaagcuuaaauauaacuucacuaggauuaagaucacuuaaggaaauaucagacggugauguaauuauaaguggaaacaaaaacuuauguuaugcaaauacuauaaauuggaaaaaacuuuucggaacuucaggacaaaaaacuaaaauaauaaguaacagaggagaaaauaguugcaaagcaacaggacaaguaugucaugcauuauguaguccagaagguuguuggggaccagaaccuagagauuguguaucauguagaaaugucagcagaggccgagaaugcgucgauaaauguaaucuauuagaaggagaaccuagagaauuuguugaaaauucagaauguauacaaugccauccagaauguuuaccacaagcaaugaauauaacauguacaggaagaggaccagauaauuguauacaaugugcacauuauauugacgguccacauuguguaaaaacauguccagcaggaguaaugggugaaaacaauacauuaguauggaaauaugcagaugccggacauguaugucauuuaugucauccuaauuguacauacggauguaccggaccaggauuagaaggaugucccacuaauggaccaaaaauaccaucaauagcaacaggaaugguaggagcacuauuauuauuacuaguagucgcacuaggaauaggaccauuacauggaagauaa

SEQ ID NO: 3675 - RNA, 3276 nt, Artificial Sequence
  AAH94761 variant
augagaccauccggaacagcuggagccgcguuacuagcauuauuagcagcauuauguccagcaaguagggcucuggaagaaaagaaagucugucaaggaacuucaaauaaauugacccaauuaggaacauuugaagaccacuuccuuucacuacaaagaauguucaauaauugugaaguaguucuaggaaaucuagaaauuacauauguacagcgcaauuacgauuuaucauucuuaaaaacaauacaagaagucgcaggguacguucucauagccuugaauacugucgagagaauaccuuuagagaacuuacaaauaauacgaggaaacauguacuaugaaaauucauaugcauuagccguacucucuaauuaugaugcaaauaaaacugguuuaaaagaauuaccaaugcguaauuuacaaggucaaaaaugugacccauccugucccaauggaucuuguuggggagcuggugaagagaacugucaaaaacuuaccaaaauaauaugcgcucaacaaugcaguggaagaugcagagggaaauccccuuccgacugcugucacaaccaaugcgccgcaggaugcacagggccuagggaaucagacugcuuaguaugccguaaauucagagaugaggcaacaugcaaagauacauguccgccacuaaugcuauacaauccaaccacauaccaaauggauguaaauccagaagguaaauacucauucggcgcaacaugcgugaaaaagugcccacgcaacuacguagugacagaccauggcaguuguguuagagcaugcggagcagauucuuacgaaauggaagaggauggaguuagaaaauguaagaaaugugaaggaccauguagaaaaguauguaauggaauaggaauaggagaauuuaaagauaguuuaagcaucaaugcaaccaauauuaaacauuucaaaaauuguacuucaauaaguggagaucuccacauucugccaguagcuuuuagaggcgauaguuuuacacacacaccaccacucgauccgcaagaauuagacauccucaaaacagugaaagaaauaacaggauuucuacuaauacaagcguggcccgaaaaccguaccgacuuacacgcauuugaaaaccuagaaauaauacguggaagaaccaaacaacauggacaauucagccucgcgguagucaguuuaaacauaacaucacuuggacuacgcucauuaaaagaaaucagcgauggagacgucauaauaagcggaaauaaaaauuuaugcuacgccaauacuauaaauuggaagaaacuauucggaaccaguggccagaaaacuaaaauaauaucuaacagaggagaaaacucuugcaaagcaacaggacaaguaugucaugccuuauguucuccugaaggaugcuggggcccagaaccaagggauuguguuucaugucguaacgucucucggggacgcgaaugcgucgacaaauguaaucuacuagaaggagaaccucgcgaguucguugaaaauucugaaugcauucaaugucauccagaaugucuaccccaagcuaugaacauaacauguacuggaagaggaccugauaauugcauacaaugugcacacuauauagauggaccucauuguguuaaaacuugucccgccgguguaaugggugagaauaauacacuuguauggaaauaugccgacgcaggacauguaugccauuuaugccauccaaacuguacauacggcugcacuggacccggacuugaaggcuguccaacaaauggaccuaaaauaccaaguaucgcuacugggaugguaggagcauuacuacuucuauuaguuguagcacuaggaauaggauuauucaugagacgucgacacauaguccgaaaaagaacgcuccgacgauuauuacaagaaagagaacuuguagaaccauuaaccccaucaggagaagcccccaaccaagccuuauuacguauacuaaaagaaacugaauuuaagaaaauaaaaguccuaggaucuggcgcuuucgguacaguuuauaaaggauuauggauuccagaaggcgaaaaaguuaaaauuccaguugcuauaaaagaacugagggaggcaacaaguccgaaagcaaauaaagaaauauuagaugaggcuuauguaauggcuucaguugauaacccacaugucugcagguuacucggaauaugucuaacaagcacugugcaacuaaucacgcaauuaaugccauucggcuguuuauuagacuauguaagagaacacaaagauaauauaggcucacaauauuuacucaauugguguguacaaauagcaaaaggaaugaacuacuuagaagaccggagauuaguacaucgugaccucgccgccagaaauguauuagucaaaacaccacaacaugucaaaaucaccgacuucggcuuagcaaaauuacuuggugccgaagaaaaagaauaucacgcagaaggaggcaaggucccaauaaaauggauggcucuagaaaguauauuacacagaaucuacacacaucaauccgauguauggucauacggagugaccgucugggaacuaaugacauucggaucuaagccuuaugaugguauaccagccagugaaauuucuucaauucuagaaaaaggagaaagacuaccacaaccaccaauauguacaauagauguuuacaugauaaugguaaaauguuggaugauagaugcugauagucguccaaaguuucgagaacuaauaauagaauuuucaaaaauggcaagagauccucaaagauaccuaguaauacaaggagacgaaagaaugcauuuaccgaguccuacagauagcaacuucuacagagcacuaauggacgaggaagauauggaugauguaguagaugcagaugaauaccuaaucccccaacaaggauucuuuucaagcccuagcacaucaagaacaccuuuacuaagcucccuaucagcaacaagcaauaauucgacagucgccuguauagauaggaacggccuacaauccugcccaauaaaagaagacaguuucuuacaaagguauucaagugauccuaccggagcacugacggaagacucaauugacgauacauuucuacccgucccuggcgaauggcuuguauggaaacaaagcuguagcucuacuagcucaacacauucagcagcagcuucacuacaguguccuucucaaguacuaccuccagcaucaccagaaggggaaacagucgcugaucugcaaacacaauaa

SEQ ID NO: 3676 - RNA, 216 nt, Artificial Sequence
  CAA34902 variant
augagaccaagcggaacagcaggagcagcauuacuagcacuauuagcagcacuauguccagcaagcagagcauuagaagaaaaaaaaggaaaaggaguaagcagaagauuaccaagaagaccaagaauagcaccaagaacaccacaaccagcacaaccaagaacaggagcaccagcaagagcaagagcaccagcaagaccauucuuauucccauaa

SEQ ID NO: 3677 - RNA, 720 nt, Artificial Sequence
  AAH10992 variant
augccauugggacacauaaugagacuagacuuagaaaaaauagcauuagaauacauaguacccugccuacacgaaguaggauucuguuacuuagacaauuucuuaggagaaguaguaggagauuguguauuagaaagagugaaacaacuucauugcacgggagcacuaagagacggacaauuagcaggaccaagagcagggguaucaaaaagacacuuacgaggagaccaaauaacauggauaggaggaaacgaagaaggaugugaagcaauaucauuuuuauuaagcuuaauagauagauuaguauuauacuguggaaguagauuaggaaaauacuauguaaaagaaagaagcaaagcaaugguagcaugcuauccaggaaacggaacaggauacguaagacauguagauaacccaaauggagauggaagauguauaacaugcauauacuauuuaaacaaaaauugggaugcuaaacuacauggaggaauauuaagaauauuuccagaaggaaaaucauucauagccgauguagaaccaauauucgacagauuacuuuuuuucuggagugauagaagaaauccacacgaaguacaaccaucauacgcaacaagauacgcgaugacaguaugguacuuugacgcagaagaaagagcagaagcaaaaaaaaaauuuagaaaucuaacaagaaaaacagaaagcgcauuaacagaagauuga

SEQ ID NO: 3678 - RNA, 1566 nt, Artificial Sequence
  BAH13456 variant
auggcuacaagccuacacgaaggaccaacaaaccaauuagaccuacucauacgagcagucgaagcaaguguucauucaucaaacgcacauugcaccgacaaaacaauagaagcagcagaggcccuauuacacauggaaucuccaacaugccuaagagacucaagaucaccagaauucauccacgcagcuaugagaccugaugucauuacagaaaccgucguagaaguaagcacagaagaaucagaaccaauggacacaucaccaauaccaacaaguccagacucacaugaaccuaugaaaaaaaaaaaaguaggaagaaaaccaaaaacacaacaaucaccaauaaguaacggaucucccgaauuagguauaaaaaaaaaaccuagagaaggaaaaggaaauaccacauaccuaugggaauuccuauuagaccuccuccaagauaaaaauaccuguccaagguauauaaaauggacccaaagagaaaaaggaauauucaaauuagucgacagcaaagcagucaguaaacucuggggaaaacacaaaaacaaaccagacaugaacuacgaaaccaugggaagagcacuaagauacuauuaccaaagaggaauauuggccaaaguagaaggacagagacuaguauaccaauucaaagacaugccaaaaaacauagucgucauagacgacgauaaaagugaaacauguaacgaagauuuggcagguacaacagaugagaaaucacucgaacgaguuucacuaagugcagaaagucuacuaaaagcagcaaguucaguaagauccggaaaaaauucaagucccauaaauugcaguagagcagaaaaaggcgucgccagagucguaaauauaacaucacccgggcacgacgcaucgaguagaagcccaacuacaaccgcaucagucucagcaaccgcagccccacgaacaguaagaguagccaugcaaguaccaguagucaugaccucccuaggacaaaaaauaaguacaguugcaguucaaucaguaaacgcaggcgcuccacuaauaacaucaacaucucccaccacugccacaucaccgaaaguuguaauccaaacaauacccacaguaaugccagcaucuacggaaaacggagacaaaauaacuaugcaacccgcaaaaaucauaacaauaccagcuacacaauuagcacaaugccaacuacaaacaaaaucaaaccuaaccggauccggaucaauaaacauaguaggaacuccacuggcaguaagagcauuaacaccagucucaauagcacacggcacuccaguaaugagacuaucaaugccuacacaacaagcaucaggccaaacgccaccaagagucauuucggcagucauuaaaggaccagaaguaaaaucagaagcaguagcaaaaaaacaagaacacgacgucaaaacuuuacaacucguagaagaaaaaccagcagaugguaacaaaacaguaacacauguaguuguaguuagugcacccuccgcaauagcauuaccagugacaaugaaaacagaaggacuaguaacaugcgaaaaauga

SEQ ID NO: 3679 - RNA, 810 nt, Artificial Sequence
  BAC67168 variant
auggcagcagcauuauuugucuuacuaggauuugcacuauuaggaacacacggagccucaggagcagcuggaacaguauucacaacaguagaagaucuaggaaguaaaauucuauuaacauguucacuaaaugacucagcaacagaaguaacuggacauaggugguuaaaaggaggaguaguauuaaaagaagacgcauuaccaggacaaaaaacagaauuuaaaguagauucagacgaucaauggggagaauacucaugcguauucuuaccagaaccaaugggaacagcuaauauacaauuacacggaccaccaagaguaaaagcaguaaaaucaagcgaacacauaaaugaaggagaaacagcaauguuaguaugcaaaagcgaaucaguaccaccaguaacagauugggcaugguauaaaauaacagauagugaagacaaagcuuuaaugaauggaucagaaaguagauuuuucguaaguagcagccaaggaagaagugaauuacauauagaaaacuuaaauauggaagcagacccaggacaauacagaugcaauggaacaaguucaaaagguucagaucaagcaauaauaacauuaagaguaagaagccacuuagcagcacucuggccauuucuaggaauaguagcagaaguacuaguacuaguaacaauaauauucauauaugaaaaaagaagaaaaccagaagauguacuagaugacgaugacgcaggaagugcaccauuaaaaaguucaggccaacaccaaaaugauaaaggaaaaaacgucagacaaagaaacucgucauaa

SEQ ID NO: 3680 - RNA, 945 nt, Artificial Sequence
  AAA35723 variant
auggcaccaccacaaguauuagcauucggauuacuauuagcagcagcaacagcaacauuugcagccgcacaagaagagugcguuugcgaaaacuauaaacuagcagucaacugcuucguaaauaacaauagacaaugccaaugcacaucagugggagcacaaaacacaguaauaugcaguaaauuagcagcaaaaugucuaguaaugaaagcagaaaugaauggaucaaaauuaggaagaagagcaaaaccagaaggagcauuacaaaacaaugacggauuauacgacccagacugcgacgaaaguggacuauuuaaagcaaaacaauguaacggaaccucaaugugcuggugcguaaacacagccggaguaagaagaacagacaaagacacagaaauaacaugcagugaaagaguaagaacauauuggauaauaauagaacucaaacacaaagcaagagaaaaaccauaugacagcaaaaguuuacgaacagcacuacaaaaagaaauaaccacaagguaucaauuagacccaaaauucauaacaaguauacuauacgaaaacaacguaauaacaauagaccuaguacaaaauaguagucaaaaaacacaaaacgacguagacauagcagacguagcauacuacuucgaaaaagacguaaaaggagaaucacuauuccacucaaaaaaaauggaccuaacaguaaacggagaacaauuagaccuagauccaggacaaacauuaauauauuacguagacgaaaaagcaccagaauucucaaugcaaggacuaaaagcaggaguaauagcaguaauagugguaguaguaauagccguaguagcaggaauaguaguacuaguaauaucaagaaaaaaaagaauggcaaaauaugaaaaagcagaaauaaaagaaaugggagaaaugcaucgagaacuaaacgcauaa

SEQ ID NO: 3681 - RNA, 2931 nt, Artificial Sequence
  CCDS169.1 variant
auggaauuacaagcagcaagggcaugcuuugcucugcuauggggaugugcucucgcugcagcagcugcugcucaagguaaggaaguaguacuucuagauuuugcagcagcaggaggcgaauuaggcuggcuuacacaucccuaugggaaagguugggacuuaaugcaaaauauuaugaaugauaugccuauauacauguauuccguuugcaacguuauguccggagaccaagauaauuggcuaagaacuaacuggguauauagaggagaagcugaaagaauauuuauagaguuaaaauuuacuguuagagacuguaauuccuuuccgggcggagcauccucauguaaagaaacauucaacuuauauuaugcugaaagugaccuagacuauggaacaaauuuccaaaaaagacuauucacaaaaauagauacaauagcaccugacgagauaacaguuucaucugauuucgaagcuagacaugugaaguuaaauguagaagaacgaucugugggaccacuaacccggaaaggauuuuaccuagcguuucaggacauuggugcaugugucgcauuacuaucaguaagaguauauuauaaaaaaugcccagaguuacuacaaggccuagcacauuuuccagaaacaauagcugguagcgaugcaccuucacuggcaacuguagcaggaacaugcguagaucaugcuguuguaccuccaggaggugaagagccacgcaugcacugugcuguagacggagagugguuaguaccaauaggacaaugccuaugucaggcuggauaugaaaaaguagaagaugcaugccaggcaugcagcccaggcuuuuuuaaauuugaagcuucagagucaccgugcuuagaaugcccagaacauacgcuuccgaguccggagggagcaacuucgugugaaugugaagaaggauucuuuagagcgccucaagacccagcaucaaugccaugcacucgaccacccucagccccacacuauuuaacagcagucgggaugggagcaaaaguugaauugcgauggacaccaccacaagauaguggaggucgagaagacauaguguacaguguuacgugugaacaauguuggccagaaagcggagaguguggaccuugugaagcuagcguuagauauagugaaccaccccacgguuuaacacgaacaucuguaacagugucagauuuagaaccccauaugaauuauacuuuuacuguugaagcgcgcaacgggguaucgggauuaguuacaucaaggucauuuagaacagcaagugucagcauaaaucaaacagaaccuccaaagguacguuuagaagguaggucaacaacaagcuuauccguaucauggucaauuccaccaccacaacaaucucgaguauggaaauaugaagugacuuauagaaaaaaaggcgauucgaauucguacaacguaagaagaacagaaggauuuaguguaacacuugaugaucuagcaccugauacuacauauuuaguacagguacaagcuuuaacccaagaaggacaaggagcaggaucaaaaguacaugaauuucagacucuuaguccugaaggaagugggaaucuggcaguuaucggcggcgucgcaguagggguaguacuacuauuaguauuagccggaguaggauuuuuuauacacagaagaagaaagaaucaaagagcacgacaaucuccagaagauguuuauuucucuaaauccgaacaacugaaaccacuuaaaacauacguugauccccauacuuacgaagacccaaaccaagccguucuuaaauucacaacagaaauccauccaucaugcguaacaaggcaaaaagugauaggugcuggagaauuuggagaagucuacaaagguauguuaaaaacaucaucaggaaaaaaagaagucccaguagcaauaaagacacuaaaagcagguuacacagaaaaacaaagaguagacuucuuaggggaagcaggaauaaugggucaauuuagccaccauaacauaauuagguuggaaggaguaaucucaaaauacaagccaaugaugauaauaacggaauauauggaaaauggagcgcuugauaaauuucugcgcgaaaaagauggagaauuuagcgugcuucaauuagucggaauguuaagaggaauugccgcgggaaugaaauacuuagcuaauaugaauuauguacacagagaucuugcagcaagaaacauuuuaguaaauucgaacuuaguauguaaaguaagugauuuuggauuaucaagaguuuuagaggaugaucccgaagcaacuuauacgacaucaggagggaaaauuccaauaagauggacagccccagaagccauuucauacagaaaauuuacuucagcaagugauguuuggucauuuggaauaguaaugugggaaguaaugacauacggcgaacgaccauacugggaauuaaguaaucaugagguuaugaaagcaauaaaugauggguucagauuaccaacuccaauggacuguccuagugcaauauaucagcuaaugaugcaauguuggcaacaagaacgagcacgaagaccuaaguuugcggauauaguaucaauccuagacaaauuaauaagagcuccagacagccuaaagacacuagcagacuuugacccaagaguaagcauaagacuaccuuccacuaguggaucagaaggaguaccauuuagaacaguuuccgaaugguuagaaucaauaaaaaugcaacaauauacagaacacuuuauggccgcuggauacacggcaauugaaaaaguaguacagaugacaaacgacgauauuaaaagaauaggaguacguuuaccaggacaucaaaaacgaauagcauacagcuuacugggccuaaaagaccaaguaaauaccgugggaauuccgauauaa

SEQ ID NO: 3682 - RNA, 2952 nt, Artificial Sequence
  AAG43576 variant
auggacugccaacucaguauauuguugcuacuaucaugcaguguauuagacagcuuuggagaauuaauuccucaaccgucuaaugaaguaaauuuauuagacagcaaaacuauacaaggagaauugggauggauauccuacccaucucacgguugggaagaaauaucaggaguugaugaacauuauacaccaauacgaacuuaccaaguguguaauguaauggaccauagccaaaauaacuggcuaagaacuaauuggguaccacgaaacucugcccagaaaaucuaugucgaauuaaaauucacucugcgagacuguaacaguauaccauuaguucuagguacaugcaaagaaacauucaauuuauauuauauggaaagugaugacgaucacggcguaaaauuuagagaacaccaauuuaccaaaaucgacacaaucgcagcagaugaaucguucacacaaauggauuuaggagacagaauauugaaacucaauacagaaauaagagaaguagguccaguaaacaagaaagguuucuaucuagcauuccaagacgugggcgcuugcguagcauuaguuucaguacgaguauacuucaagaaauguccguuuacugucaaaaauuuagcuauguuuccagauaccguaccaauggauucccaaagucuaguugaaguucgaggaucauguguaaacaauucaaaagaagaagaucccccaagaauguacuguucaacggaaggugaauggcuaguccccauagguaaauguagcugcaaugccggauaugaagaaagagguuucaugugccaagcauguagaccaggauuuuacaaagcacuagauggaaauaugaaaugugcuaaauguccaccacauucaagcacacaagaagauggcucaaugaauugcagaugugaaaauaauuauuuuagagcagacaaagauccaccuucaauggcaugcacaagaccaccaucaaguccuagaaauguaauaucuaacaucaacgaaacaagcguaauauuagauuggagcuggccuuuagauacagggggacgaaaagacguaacauuuaauauaaucuguaagaaaugcgguuggaacauaaaacaaugugagccaugcucaccaaauguaagauuccuaccaaggcaauucgggcuaacuaacacaacagucacaguaacggaucuacuagcacauacaaauuacacuuuugaaauagaugcuguaaacggagucagcgagcuaaguucaccacccagacaauucgcagcuguuucaauaacaaccaaccaagcugcaccaucaccaguccuuacaaucaagaaagaccgaacaucaagaaacucuauuucacuaucauggcaagaaccagaacacccuaauggaauaauccuagacuaugaaguuaaauauuacgaaaaacaagaacaagaaacuucuuauacuauacuacgugcaagaggaacuaauguaacaauuuccagucuaaaaccugauacaauauacgucuuccaaauacgcgcaagaacagcagcggguuacggaacaaauucuaggaaauucgaauuugaaacaucuccagauuccuuuucaauuucuggugaauccucacaagucguaaugauagcaauauccgcagcaguagcaauaauuuuauuaacaguaguaaucuauguuuuaauaggaagauucugcgguuauaaaaguaaacauggcgcagacgagaaacgauuacauuucggaaauggacaucuuaaauuaccaggccucagaacauauguagauccccacacuuaugaagacccaacucaggcaguacacgaguucgcgaaagaacuagaugcaaccaacauaucaauagacaaaguaguuggggcuggagaguucggagaaguauguaguggaagauuaaaacuaccaaguaaaaaggaaauaucaguugcgauaaagacgcugaaaguggguuacacagaaaaacaaagaagagauuucuugggagaagcuagcauaaugggccaauuugaccauccuaauauaauacgauuagaaggagugguaacuaagucaaagccaguaaugauuguaacagaauacauggaaaacggaagccuagauucauuuuuaaggaaacacgaugcacaauucacaguaauucaauuaguaggcauguuaagagguaucgcaucagguaugaaauauuuaucagacaugggguacguacaucgcgacuuagcagcucgaaauauuuuaauaaauucuaaucucguauguaaaguaucagauuuuggucuauccagaguauuagaagaugacccagaagcugcauacacuacccgagguggaaaaaucccaauucgcuggacaucaccagaagcaauugcauaucgaaaauuuacuagcgcuucagacguauggucauauggaauuguccuaugggaaguuaugucauacggagaaaggccauauugggaaaugucaaaccaagacguaauaaaagcaguagaugaagguuauagacuaccuccaccaauggauugcccagcagcacuuuaucaauuaauguuagacugcuggcaaaaagaucgaaauaauagaccaaaauuugaacaaauaguaagcauucucgacaaauuaauaagaaacccugguagccuaaaaauuauaacaucagcugccgcacgaccaucaaaucucuuacucgaccaaucaaacgucgacauaacgacuuucagaacaacaggagauuggcuuaauggugucuggacagcgcacugcaaagaaauauuuacaggaguugaauacucgagcugugacaccauagcaaaaauuucaacugacgauaugaagaaaguuggaguaacuguaguaggcccacagaagaaaaucauaaguagcauaaaagcauuagaaacccaaagcaaaaauggcccaguaccaguauaa

SEQ ID NO: 3683 - RNA, 2952 nt, Artificial Sequence
  AAH63282 variant
auggacugucagcuaaguaucuuauuauuauuaaguuguaguguuuuggacucauucggagaacuaauaccacagccaucaaacgaggucaaucuauuagacagcaaaacaauacaaggugagcuaggauggauaucuuacccaucacaugguugggaagaaauaaguggaguagacgaacacuauacccccauacgcacauaccaagugugcaaugucauggaucacucacaaaauaauuggcuuagaacaaauugggucccaagaaauagugcucagaaaauauauguagaacuaaaauuuacacuaagagauuguaauaguauaccauuaguacuagggacguguaaagaaacauucaauuuauauuauauggaaucagaugaugaccaugguguaaaauuccgagaacaccaauuuacaaaaauagacacaauugcggcagacgaaucuuucacucaaauggacuuaggugacagaauacuaaaauuaaauaccgaaauucgagaaguaggaccaguaaacaaaaaaggauuuuaccuagcauuucaagauguuggugccugcgucgcccucguaucagucagaguauauuuuaaaaaaugucccuuuacaguaaaaaauuuggcuauguucccagacacuguucccauggacucacaaucuuugguagaaguuagaggaagcuguguuaauaauaguaaagaagaagacccacccaggauguacugcucgacagaaggagaauggcugguaccaaucggaaaaugcucauguaaugcuggauacgaagaacgcggauuuaugugucaagcaugccgcccagguuucuauaaggcacuugacgguaacaugaaaugcgcaaaauguccuccacauucaaguacacaagaagacggaucgaugaauugccgcugugaaaacaacuauuucagagcagauaaagacccucccucaauggcaugcaccaggccaccaucaucaccucgaaaugucauaaguaauauaaaugaaacaucaguaauauuagacuggucauggccauuagauacagguggcagaaaagacguaaccuucaacauaauuuguaaaaaaugugguuggaauaucaaacaaugugaaccauguucaccaaauguaagauuucuuccaaggcaauucggauugacuaauacuacaguaacaguuacagauuuacuagcacacacgaacuacacauuugaaauagaugcagucaacggaguaagugaauuauccagcccaccucgacaauuugcagcugucucaauaacaaccaaucaagcagcuccuaguccaguauugacaauaaaaaaagauagaacaucaagaaacucaauuagcuuaucauggcaagagccugaacacccuaacggaauaauucuagauuacgaaguaaaauacuaugaaaaacaagaacaggaaacaucauauacuauauugagagcaagaggaacaaauguaacaauaagcagucucaaacccgauacaauuuacguauuccaaauacgagcacgaacagcggcagguuauggaacaaacucacgcaaauuugaauucgaaacuucacccgauucuuuuagcauaaguggcgaaucaucacaaguggugaugauagcuaucucagcagcaguagccauaauucuauuaacaguaguaauuuauguuuuaaucggaagauucuguggauauaaaucaaaacauggcgcagaugaaaaaagacuacacuuuggaaacggccacuuaaaacuaccaggucuacgaaccuacguagacccacauacuuacgaagauccaacacagacaguacaugaauuugcaaaagaauuggacgcaacgaauaucuccauagauaaaguagucggagcaggcgaauuuggagaaguauguagcgguagacuaaaacuaccaucaaagaaagaaauauccguugcaauaaaaacccucaaaguaggauacaccgagaaacaaagaagagauuuccucggagaagccucaauaaugggucaauuugaccacccuaacauaauacgccuagaaggaguaguaacaaaaucaaaaccaguuaugaucguaacagaauacauggaaaauggaucuuuagacagcuuucucagaaaacaugacgcacaauuuacuguuauacaacuuguagguaugcuaagaggaauagccucagguaugaaauacuuaucugauaugggcuauguucaccgugaucucgcugcaagaaacauuuuaauuaacagcaaccucguauguaaaguaagugacuuuggauuaaguagaguucuagaagacgacccagaagcagcauacacaacaagaggaggaaaaaucccuauaagguggacaucaccagaagcaauagccuacagaaaauuuaccucagcgucagaugucuggucauauggcaucguacuaugggaagucaugagcuauggagaaagaccauauugggaaaugagcaaccaagaugucauuaaagcaguagacgaaggauaucgacuuccaccaccaauggacugcccugcagccuuguaucaauuaauguuagauuguuggcaaaaagauagaaauaauagacccaaauuugaacaaauuguaucaauuuuagauaaacuaauuaggaauccgggaucauuaaaaauaaucacauccgcagcagcaagacccaguaaccuauuauuggaucaaaguaauguugauauaacaacauucagaacuacuggagauuggcuuaacgguguuuggacugcccauugcaaagaaauauucacaggaguugaauauuccucaugugauacaauagcuaaaaucucaacagaugauaugaaaaaagucggugucacaguagugggcccucaaaaaaaaauaaucaguagcauaaaagcccuggaaacccaaucaaaaaauggaccuguuccaguauaa

SEQ ID NO: 3684 - RNA, 1389 nt, Artificial Sequence
  BAG54127 variant
augccaaugucaacaauuuuaccaguaacaucucccuguuuaccagcaacaggaguuacaguaugggaauuaaugacauuuggcgcugaaccauacgccggucuuagacuagcagaaguuccagaucuauuagaaaaaggagaacgacuugcacaaccacaaaucuguaccauagauguauacaugguaaugguaaaaugcuggaugauagaugaaaauauuagaccaacguuuaaagaacuugcuaaugaguuuacaaggauggcuagagacccaccuagauaucuuguaauaaaacgagaaucaggaccagguauagcaccaggaccagaaccacauggauuaacgaauaaaaaauuagaagaaguagaacuugaaccagaauuagaucuagauuuagaccucgaagcagaagaagauaacuuagcaacaacuacucuagggucagcucuaucacuaccuguaggaacacuaaaccgaccaagaggaagucaaucauuauuaucaccaucuucgggauauaugccaaugaaucaaggaaauuuaggagaaucaugccaagaaucagcagucucaggaucaucagagagauguccaagaccaguaucauuacauccaaugccacgagguuguuuagcuucugaaaguucagaaggacacgucacagguucagaagcagaguuacaagaaaaaguuucaaugugcagaucaagaaguagaucaaggucaccacgaccuagaggugacucagcauaccauagccaaagacauucacuccuuacgccggucacaccacuaaguccaccaggacuagaagaagaagacguaaacggauauguaaugccagauacacaucuuaaaggaacaccaucaucaagagaaggaacauuauccucaguuggacuaaguucuguauuaggaacagaagaagaagaugaagaugaagaauaugaauauaugaauagaagaagaagacauagccccccacauccuccaagaccaagcucauuagaagaguuaggcuacgaauauauggacguugguucagaccuaucagcauccuuaggaucaacccaaagcugcccuuuacauccaguaccaauaaugccaacagccggaacaacaccagaugaagauuaugaauauaugaacaggcaaagagauggaggaggaccaggcggagauuacgcagcaaugggagcaugcccugcaucagaacaagguuaugaagaaaugagagcauuccaaggaccaggacaucaagcaccacacguacauuaugcacgauuaaaaacauuacgaucauuagaagcaacagacucagcauucgauaauccagauuauuggcauucacgauuauucccaaaagcaaaugcacaaaggacauaa

SEQ ID NO: 3685 - RNA, 2766 nt, Artificial Sequence
  BAG57868 variant
augagagcuaacgaugcauuacaaguacuaggacuuuuauucaguuuagcaaggggauccgaaguaggaaacagccaggcuguauguccaggcacguuaaauggcuuaagcguaaccggagaugcagaaaaccaauaccaaaccuuauauaaauuauaugaaaggugugaagucguaauggguaacuuagaaauaguuuuaacuggccauaaugcugaucuuucauuucuacaauggaucagagaaguaaccggauacguccuaguagcuaugaaugaguucucgacacuaccucuaccuaaucugagaguuguuagagguacacaaguauacgaugggaaauucgcuaucuuuguaaugcuaaauuauaauacuaacucuagucacgcauuaagacaacuccgauuaacacaacuaacagaaauacucucaggugggguauauauagagaaaaacgauaaacuaugucauauggauacuauagauuggagagacauagugagagauagagaugcagaaaucguaguuaaagauaacggaagaaguuguccaccaugucaugaaguauguaaaggaagaugcugggguccuggaagugaagauugucagacacuaacuaagacuauaugcgcaccucaaugcaauggacauuguuucggaccaaaccccaaucaaugcugccaugaugaaugugccgggggaugcaguggaccacaggauacagacugcuuugcauguagacauuuuaacgauuccggugcaugcgucccaagauguccacaaccucuaguuuacaauaagcuaacauuucaauuagaaccaaacccacauacaaaauaccaauauggagguguaugugucgccucauguccccauaauuucguuguagaucaaacuagcugcguaagagccuguccaccggacaaaauggaaguagacaaaaacggacuuaaaaugugugaaccaugcggagggcuaugucccaaagcaugugaaggcacuggcaguggaucuagauuucaaacuguugauagcaguaauauagacggauuuguaaauuguacuaaaauacuaggcaaccuagauuuucucauaaccggucuuaauggcgauccuuggcauaaaauaccagcguuagauccagaaaaauuaaacguuuuucgaacaguacgagaaauuacaggcuaucuuaauauccaaucuuggccaccacauaugcauaauuuuaguguauuuucaaaccuaacgacuauuggaggaagaucauuauauaauagaggcuuuucauuacugauuaugaaaaaccuaaacguaacaucacuaggauuuagaucauuaaaagaaauuucagccggcagaauauacauaucagccaauagacaacuauguuaucaucauucauuaaacuggaccaagguacucaggggaccgaccgaagaaagauuggauaucaaacauaauaggccuaggcgagauugcguagcagaaggaaaaguaugugauccauuauguagcaguggaggauguuggggacccggucccggacaaugccuaucaugcagaaacuauagcagaggcggaguaugcguaacucacuguaauuucuuaaacggugaaccaagagaauuugcacaugaagcugaaugcuuuaguugucacccagaaugccaaccaauggaaggaaccgcaacguguaacggcaguggaucagauaccugcgcacaaugcgcacacuuuagagacggaccccauuguguaucuucuuguccacauggaguacuaggagcgaaagggccaauuuauaaauauccagauguacaaaacgaauguagaccaugucaugaaaacuguacucaggguuguaagggaccagaauuacaagacugucuaggacaaacauuaguccuaauaggaaaaacacaucuaacaauggccuuaacuguuauugccgggcuaguaguaauauuuaugaugcuaggaggaacauucuuauauuggagagguagaaggauacaaaacaaacgagcaaugcgacgauacuuagaacgaggugaaaguauagaaccuuuagauccauccgaaaaggcaaauaaagucuuagcaagaauauuuaaagaaacagaacuaagaaaacuaaaaguguuagguucuggagucuuuggaacaguccauaaagggguuuggaucccagagggagaaaguauuaaaaucccaguauguauaaaaguaauagaagauaaaucagguagacaaaguuuccaagcagugacagaucauauguuagcuauaggcucguuagaccaugcccauaucguuagauuacuugguuuauguccaggcaguucucuacaauuaguaacacaguaucuaccacuaggcagcuuauuagaucauguuaggcaacaccguggagcauuaggaccacaacuauuauuaaacuggggaguacaaaucgcaaaagguauguacuaccuggaagaacacggaaugguacaccgaaauuuagcugcaagaaauguuuuacuuaaaucuccaucgcaaguacaaguugcugauuuuggaguagcagacuuacuuccaccagacgauaaacaacuucucuauucagaagccaaaaccccaauaaaauggauggcccuagaaucuauacauuucggaaaauauacucaucaaagugauguauggaguuacggacaauguauauggaugccaaguuuaccaucacuagcaccaguauccaaccuaccuuucgaaacaccuagcuaa

SEQ ID NO: 3686 - RNA, 3927 nt, Artificial Sequence
  AAB59446 variant
augaagccugcaacagggcucuggguaugggucagcuuauugguagccgcaggaacuguccaaccaagugacagucaaucuguaugugcaggaacagaaaacaaauuaaguucucuguccgaucucgaacaacaauaucgagcacucaggaaauauuaugaaaauugugaagugguuaugggaaauuuagaaauaacaucaauugaacacaaccgcgaccuauccuuuuuaagaucaguuagggaagugacuggauauguauuaguugcuuuaaaccaauuucgauauuuaccucuagaaaaucugcgaauaauacgaggcacgaaguuauaugaagaucgauaugcauuagcuauuuuccuaaauuauagaaaggauggaaacuuuggcuugcaagagcuaggacuuaaaaauuuaaccgaaauuuuaaauggugguguuuaugucgaucaaaauaaauucuuaugcuacgcagauacgauccacuggcaagauauuguacgaaacccauggccgaguaaucucacucuaguuucaacaaauggaaguaguggguguggcagaugucacaaaucuugcacagguagauguuggggaccaacugaaaaucacugccaaacacugacaagaaccguaugcgccgaacaaugcgauggaagauguuacggaccauacguauccgacuguugucaucgcgaaugugcaggcggcuguagcggucccaaggauacagacuguuucgcguguaugaacuuuaacgacuccggagccugcguaacacaaugcccacaaacauuuguauacaacccaacuaccuuucaauuggaacauaauuucaaugcaaaguacacauacggagcauuuugcguuaagaaaugcccucacaacuucguuguagacucuucuuccugcguaagagccugcccaucaucaaaaauggaaguugaagaaaacggaauaaaaauguguaaacccugcacagacauauguccgaaagcaugugauggaauuggaaccggcucauuaaugagugcccaaacuguagacaguuccaauauagauaaauuuauaaauuguacaaaaauuaacgguaaucuuauauuucuaguaacagguauucauggagauccauacaacgcuauagaagcaauagacccagaaaaacuaaacguauuccgaacgguuagggaaauaacuggauuuuuaaauauacagucauggccuccuaacaugacagauuucaguguauuuaguaauuuaguaacaaucgguggacgcguacuuuauaguggacuaucucuauuaauuuuaaaacaacaggguaucacuucacuacaauuucaaagucuaaaagaaauauccgcugguaauauauauauaaccgauaauaguaaccuauguuauuaucauacaauaaauuggacaacucuauucucuacaaucaaucaacgaauuguaauaagggauaacagaaaagcagaaaauuguacugcagaaggcaugguauguaaucacuuauguaguagugacggcugcugggguccuggaccugaucaaugcuuaucuuguagaagauuuaguagaggaagaauaugcauagaauccugcaauuuauacgacggagaauuucgcgaguuugagaauggaaguauauguguagaaugugauccccaaugcgagaaaauggaagaugguuuacuaacaugccacgggccuggaccagauaauuguacaaaaugcagccauuucaaagauggacccaauuguguagaaaaaugcccagauggacuucaaggcgcaaauucauuuauuuuuaaauaugcagaucccgaucgagaaugucauccuugucauccaaacuguacacaaggauguaauggaccaacaucucaugauuguauauauuauccuuggacgggacauucaacacuaccucaacaugcaagaacuccccugaucgccgcuggaguuauaggugggcuauucauccuaguaauaguuggcuuaacauuugcaguuuaugucagaaggaaaucuauuaaaaagaaacgagcacuuaggagguuuuuggaaacugaauuaguagaaccuuuaacaccgucgggaacagcaccaaaccaagcacaacuaagaauacuuaaagaaaccgaacuaaaaagaguaaagguauugggcagcggagcauucggaacaguauauaaggggauauggguaccagaaggugaaacagucaaaauaccuguagcaauaaaaauacugaacgaaacaacaggcccaaaagcaaacguagaguucauggaugaagcacuaauaauggcaucuauggaccacccacaccuuguacgauuacuaggaguaugccuaucuccaacaauacagcuagugacccaacuaaugccucacgguugucuccuagaauauguacaugaacacaaagacaacauaggaagucaacuauuguuaaacugguguguacaaauagcaaaaggaaugauguauuuagaggaacggcguuugguccauagagaucuagcugcgcggaauguucuaguaaagucaccuaaucaugugaaaauaacugacuucggauuagcaagacuccucgaaggagaugaaaaagaauacaaugcugauggcgguaaaaugccaauuaaauggauggcacuagaauguauacauuacagaaaauuuacucaccaaucagauguuuggucauauggagugacaaucugggaauuaaugacuuucgguggaaaaccauacgauggaaucccaacgagagaaauaccugaucuccuggaaaagggugaaagauuaccgcaacccccaauaugcacgauagauguuuauaugguuaugguaaaaugcuggaugauagaugcagauagcagaccuaaguucaaggaauuagcugcagaauuuucacgaauggccagagacccccaacgauaccugguaauccaaggagaugaucgaaugaaacuacccaguccaaacgacuccaaauucuuucaaaaucuucuagaugaagaagacuuggaagacaugauggaugcagaagaauauuuaguaccucaagcauuuaauauuccaccgccaaucuauacuucaagagcuagaauagacucuaaucgaucagagauaggucacucaccacccccugccuauacuccaaugucuggaaaucaauuuguauaucgagauggcggauuugccgcagaacaaggaguaucuguuccauaucgugcacccaccucaacaauaccagaggcacccguagcacaaggagcuacagcagaaaucuuugacgacaguuguuguaacgguacguuaagaaaaccagucgcaccacauguacaagaagauucaagcacacaaagauauucugccgacccuacaguauucgcaccagaaagaucaccaaggggagaacuggaugaagaaggguacaugacuccaaugcgagauaaaccaaaacaagaauauuuaaauccugucgaagaaaauccuuucguaucacggaggaaaaacggagaccuccaagcgcuggauaaucccgaauaucacaaugcgaguaauggaccacccaaagcggaagacgaauauguaaacgaaccacuauaucuaaacacuuuugcaaacaccuuaggaaaagcagaauauuuaaagaauaacauauugaguaugccagaaaaagcaaagaaagcauuugacaacccugacuacuggaaucauucguuaccaccaagaucaacucuacaacauccagauuauuuacaagaauacucuacaaaauacuucuauaaacaaaauggaagaauacgcccaauaguugccgaaaauccagaauaccuaucagaguucucacuuaaaccugggacuguucucccaccacccccuuaucggcaucgaaauaccguaguauaa

SEQ ID NO: 3687 - RNA, 1461 nt, Artificial Sequence
  CCDS46648.1 variant
augauacaaacaguucccgacccagcagcacacauaaaagaagcacuaucaguaguuucagaagaucaaucucuuuucgaaugcgcauacgguacuccacacuuagcaaaaacagaaaugacugcaucaucaucauccgacuacggacaaacaucaaaaaugucaccacguguuccacaacaagacuggcuaucacaaccaccagcaagagucacuauaaaaauggaaugcaauccaucccagguaaacgguucaagaaauucuccagacgaaugcuccguagcaaaaggaggaaaaaugguaggcuccccagauacagucgguaugaacuauggaucauacauggaagaaaaacauaugcccccacccaacaugacaacaaacgaaagaagaguuauaguaccugcagauccaacacuauggaguacagaccacguaagacaauggcuagaaugggcaguaaaagaauacggacuaccagauguaaacauacuucuauuccaaaacauagauggcaaagaauuaugcaaaaugacaaaagacgacuuucaacgauuaacaccaucauauaacgcagauauauuacuaucucaccuccacuaccuacgagaaacaccuuuaccacacuuaaccucagacgacgucgacaaagcacuacaaaacucaccuagacuuaugcacgcaagaaauaccggaggcgcagccuucauauucccaaacacaucuguauaccccgaagcaacacaaagaauaacaacacgaccagaccuaccauacgaaccaccucgacgaucagcuuggaccggacacggacaccccacaccacaaucaaaagcagcccaaccaucccccagcacuguaccuaaaacagaagaccaacgaccacaacucgauccauaccaaauauuaggaccaacauccucuagauuagcuaacccaggaucaggucaaauccaauuauggcaauuccuucuagaauuacuaucagauucuucaaacucaucaugcaucaccugggaagguacaaacggagaguucaagaugaccgacccagaugaaguugcaagaagauggggagaaagaaaaucaaaaccaaacaugaacuacgacaaauuaucgagagcccuaagauacuauuacgauaaaaacauaaugacaaaaguacacggaaaaagauacgcauauaaauucgauuuccacggcauagcacaagcauuacaaccacauccaccagaaucaucauuauacaaauacccaucagauuuaccauacaugggcucauaccaugcccauccacagaaaaugaacuucguagcaccacaucccccugcuuuaccaguuacuucauccuccuucuucgcugccccaaacccauacuggaacucaccuacaggaggaauauauccaaauacucgacuaccaacaucucacaugccaagucacuuaggaacauacuacuaa

SEQ ID NO: 3688 - RNA, 1359 nt, Artificial Sequence
  AAA19786 variant
augagcgaaacccccgcucaaugcagcauaaaacaagaacgcauuucauauacaccaccagaaucaccaguaccauccuaugcaucuucaacaccauuacauguaccaguaccccgagccuuaagaauggaagaagauucaauaagacucccugcacauuuaagacuacaaccaauauacuggucuagagacgauguagcacaaugguuaaaaugggccgaaaacgaauucucacuacgaccuauagauagcaacacuuucgaaaugaauggcaaagcacuacuauuacuaacaaaagaagacuucagauaccgaucaccacacagcggagauguauuauaugaauuauuacaacacauauuaaaacaacgaaaaccacgaauacuauucucacccuucuuucauccaggaaauucaauacauacacaaccagaaguaauucuacaucaaaaucacgaagaagacaacugcguacaaagaacaccaagaccaucaguagauaacgugcaccauaacccuccaacaaucgaauuacuacacagaucaagaucaccaauaaccacaaaucacagaccaucccccgaccccgaacaacgaccuuuacgaucaccacuagacaacaugauucgccgccucucuccagcagaaagagcucaaggaccaagaccacaccaagaaaacaaccaccaagaauccuauccccuaucaguaucaccaauggaaaacaaucacugcccagccucauccgaaucacacccaaaaccaucuucacccagacaagaaucuacaagaguaauacaacuaaugccaucucccaucaugcacccacucauacucaauccccgucacucaguagauuucaaacaaucucgacucucagaagacggauuacacagagaaggaaaaccaauaaaccucucacauagagaagacuuagcauauaugaaccacauaaugguaucuguauccccacccgaagaacaugcuaugccuauaggucgaauugcagacugccgccuccuaugggacuauguauaucaacuccucucagacuccagauacgaaaacuucauccgaugggaagacaaagaaucaaaaaucuuuagaaucguagaccccaacggacuugcaagacuauggggaaaccauaaaaaucgaacaaacaugacauaugaaaaaaugucaagagcacuacgacacuauuacaaauuaaacauaauaagaaaagaaccaggacaacgacuacuauuccgauucaugaaaacuccugaugaaauaaugucaggccgcacugacagacuagaacaccuagaaucacaagaauuagacgaacaaauauaccaagaagacgaaugcuag

SEQ ID NO: 3689 - RNA, 1971 nt, Artificial Sequence
  AAH04817 variant
auggccaguacagauuacucaacauauucccaagcagcagcccaacaaggauauagcgcuuauacagcucaaccgacgcaaggcuaugcacaaacaacacaagcauauggacaacaaaguuacggaacuuauggacaaccaacagauguuagcuacacacaagcacaaaccacagcuacauauggacaaacagcuuaugcuacaucauauggccaaccaccaacagguuacacaaccccgaccgcuccacaggcuuauagucaaccaguacaaggauauggaacaggggcauacgauacuacgacagcaaccgucacaaccacacaggcaagcuaugcagcacaaucagcauauggaacacaaccagcauacccagcauauggacaacaacccgcagcaacagcacccacaagaccacaagauggcaauaaaccaacagaaacaagucaaccacagucaucaacagguggauacaaucaaccaucuuuaggguauggucaaucaaauuauucguacccgcaaguaccagguuccuauccaaugcaaccaguaacugcuccuccaucuuauccaccgacaagcuauuccaguacacaaccgacaucuuaugaccaaaguucauauagucaacagaauacuuauggucaaccaaguucauauggucaacaauccaguuacggccaacaaucaaguuauggucagcagccaccuacuucauauccaccacaaaccggaaguuauucucaagcacccagccaauauagucaacaaucuaguucauauggacaacaaagcucauuucgacaagaucauccaaguaguaugggcguauauggacaagaaucaggaggauuuucaggaccaggugaaaauagaucaaugucuggcccagauaacagaggcagaggaagaggaggauuugaccgaggaggaaugucaagaggaggaagaggaggaggaagaggaggcaugggaagcgcaggagaaagaggaggauucaauaaaccaggugggccgauggaugaaggaccagacuuagauuuaggaccaccaguagauccagaugaagacagcgacaauagcgccauuuauguacaaggacuuaacgacaguguaacucuagaugaccuggcagauuucuuuaaacaauguggaguagugaaaaugaacaaaagaaccggucaaccaaugauucauaucuaucuugauaaggagacaggaaagccuaaaggugaugcaacaguuucauaugaagauccaccaacagcaaaagcagcaguugaaugguuugauggaaaagauuuucaagguucaaaauuaaaaguaaguuuagcaagaaagaaaccaccaaugaauaguaugagaggaggacuaccgccacgagaaggaagagguaugccaccgccacuaagaggaggaccaggaggaccaggaggaccaggagguccaaugggaagaaugggcggacgaggaggagaucgaggaggauucccaccaagagguccaagaggaaguagaggaaacccuagugguggaggaaaugugcaacaucgagcaggagauuggcaaugcccaaauccgggaugcgguaaccaaaauuuugcauggagaacagagugcaaucaauguaaagcaccaaaaccagaaggauuccuaccaccaccuuucccaccaccagguggagauagaggcagagguggcccuggaggaaugagagguggcagaggaggauuaauggaccgaggugguccaggaggaauguuuagaggagguagagguggagauagaggaggauuuagaggcggucgaggcauggauaggggaggauucgguggaggaagaagaggaggacccggaggaccaccaggaccauuaauggaacaaaugggaggcaggcgaggaggaagagguggaccagguaaaauggacaaaggagaacauagacaagaaagaagagaucgaccuuauuaa

SEQ ID NO: 3690 - RNA, 1998 nt, Artificial Sequence
  AEA07595 variant
augggacaaacaggcaaaaaaucagaaaaaggaccagucugcuggaggaaaagaguaaagucugaauacaugagauuaagacaacuaaaaagauuuagacgagcagaugaaguaaaaagcauguuuagcucaaacagacaaaaaauacuagaaagaaccgaaauacuaaaccaagaauggaaacaaagaagaauacaaccaguccacauauuaacaucaguaaguucauuaagagguacaagagaaguugaagacgaaacaguacuacauaacauaccauauaugggcgaugaaguacuugaucaagauggcacauucaucgaagaacucauaaaaaauuaugauggaaaagugcauggagacagagaauguggauuuauuaaugaugaaauauuuguagaauuaguaaacgcgcuaggucaauauaacgaugaugacgacgacgacgauggagaugacccagaagaacgagaggaaaaacaaaaagaccuugaagaccauagagacgacaaagaaagcagaccuccaagaaaauuuccuagugacaaaauauuugaagccauaagcucaauguucccggauaaaggcacugcggaagaauuaaaagaaaaauacaaggaauuaacagaacaacaacuaccuggagcgcuaccaccagaauguacaccaaauaucgacggaccaaacgcuaaaagcguacaaagagaacaaucacuacauagcuuccauaccuuauuuugccgaagauguuuuaaguaugauugcuuucuacauccauuucacgcaacgccuaauaccuacaaaagaaaaaacacggaaacagcacucgauaacaagccauguggaccucagugcuaucaacaccuagaaggagcaaaagaauuugccgcugcacuaacagcagaaagaauaaaaacaccuccaaaaagaccaggaggaagaagaagaggaagacucccaaacaauucaucgaggccaagcacaccaacaauaaaugucuuagaaucaaaagauacagauucugaucgagaagcaggaacugaaacaggaggagaaaacaacgauaaagaagaagaagaaaaaaaggaugaaacuucaagcagcagcgaagcaaacagcagaugccaaaccccaauaaaaaugaaacccaauauagaaccaccagaaaauguugaauggucuggggcugaagcgagcauguuccggguacugaucggaacauacuacgacaauuuuugugcaauagcaagauuaauaggaacaaaaacuuguagacaaguauaugaauuucgaguaaaagaaucaaguauaauagcaccagcaccagcagaagauguagacacuccaccucgaaaaaaaaaaagaaaacauagacuaugggcugcucacugucgaaaaauacaacuaaaaaaaggacaaaauagauuuccaggaugcagauguaaagcacaauguaauacaaaacaaugucccuguuaccuagcagucagagagugugauccagauuuaugcuuaacgugcggagcagcagaucauugggauucaaaaaauguaagcuguaaaaacugcucuauacaacgaggaucaaaaaaacauuuauuauuagcgccaagugacgucgccggauggggaauuuuuauaaaagacccaguacaaaaaaaugaguuuaucucagaauauugcggugagaucauaucacaagaugaagcagauagaagaggcaaaguauaugacaaauauaugugcagcuuuuuauucaacuuaaauaacgacuuuguaguagacgcaacaagaaaaggcaacaaaauacgauuugcaaaccauagcguuaauccaaacugcuacgcaaaagucaugaugguaaauggcgaucacagaauugguauauucgcaaagcgagccauccaaaccggagaagaacuauuuuucgauuauagauauucacaagcagacgcccuuaaauauguaggcauagaaagagagauggaaauaccauaa

SEQ ID NO: 3691 - RNA, 1005 nt, Artificial Sequence
  EAW80068 variant
augggacaaacaggaaaaaaaagugaaaaaggaccaguaugcuggagaaaacgaguaaaaucagaauacaugagauuaagacaauuaaaaagauucagacgagcagacgaaguaaaaaguauguucucaucaaacagacaaaaaauacuagaaagaacagaaauauuaaaucaagaauggaaacaaagaagaauacaacccguacauauauuaacaucuguaucaagccuaagagguacaagggaaugcucaguaacaucagaccucgacuucccaacccaaguaauaccacuaaaaacacuaaacgcaguagcaagcguaccaauaauguacaguuggucaccauuacaacaaaacuuuaugguagaagacgaaacaguguuacacaacauaccauacaugggagacgaaguucuagaccaagacgguacauucauagaagaacuaauaaaaaacuacgacggaaaaguacacggagacagagaauguggauuuauaaaugaugaaauauucguugaauuaguaaacgcuuuaggacaauauaacgacgacgacgacgaugacgauggagacgacccagaagaaagagaagaaaaacaaaaagaccucgaagaccauagagacgauaaagaaaguagaccaccaagaaaauucccuucagacaaaauauuugaagcaauaagcucaauguucccagauaaaggaacagcagaagaacuaaaagaaaaauacaaagaauuaacagaacaacaacuaccaggagcauuaccaccagaaugcaccccaaacauagacggaccuaacgcaaaaagcguacaaagagaacaaucacuacacagcuuccacacacuauucugcagacgaugcuuuaaauacgacuguuuccuacacccauuucacgccacaccaaacacauauaaaagaaaaaauacagaaacagcacuagacaacaaaccaugcggaccacaaugcuaucaacaccucccacucuuaccaagaaacuaa

SEQ ID NO: 3692 - RNA, 195 nt, Artificial Sequence
  CCO13726 variant
augccacuaguaaacauaaugaugaugacaaugaugaugauggaaacaauacuaaaaaaagaaaaaaaaucaagaaaaauauggagaauaacagaaaugauaaaaaaagcagcacaccuaggaaacuuccuacuaauaaaauuccuaaaaccauucccacaaugcuuccaaauaagagcacaacaaaaaaacuaa

SEQ ID NO: 3693 - RNA, 2241 nt, Artificial Sequence
  AAC51520 variant
augggccagacaggaaaaaaaucagaaaaaggaccaguuuguuggaggaaaagaguaaaaucggaauauaugcgcuuaagacaauuaaaaagguucagacgagcagacgaaguuaaaucaauguucaguucaaauagacaaaaaauucuagaaagaacagaaauacuaaaucaagaauggaaacaaagacgaauacaaccaguacacauacuaacgucuguuucuucauuaagagguacgagagaauguaguguaacaucagauuuagacuuuccuacacagguaauaccacuaaaaacuuuaaacgcaguagcaaguguaccaauaauguacucauggucaccuuuacaacagaauuuuaugguagaagaugaaacuguacuacauaauauaccauacaugggugacgaaguacuagaucaagauggaacuuuuauagaagaauuaauuaaaaacuaugacggaaaaguacacggggacagggaaugcggauucaucaacgaugaaauauuuguagagcucguaaacgcucuaggccaauauaacgacgacgaugacgaugaugacggcgaugacccagaagaaagagaagaaaaacagaaagaccuagaagaccacagagacgauaaagaaagcagaccaccacgaaaauuuccuucugauaaaaucuucgaagcaauaucaaguauguuuccggauaaaggaacagcagaagaacuaaaagaaaaauauaaagaacuaacugaacagcaauuaccuggagcucucccuccagaaugcacaccuaauauagauggaccaaaugcuaagucuguucaacgagaacagucauuacacucauuccauacauuauuuuguagaagauguuucaaauacgauuguuuucuacacccauuucacgccacaccaaacacauauaaaagaaaaaacacagaaacggcauuagacaauaaaccauguggaccacaaugcuaccaacaccuagaaggcgcaaaagaauucgcagccgcacugacagcagaaagaauaaaaacuccaccaaaaagaccagguggacgaagaagaggaagacuaccaaauaauucuucuagaccgucaacacccacaauaaauguacucgaaucaaaagauacagacuccgauagagaagcaggaacagaaaccggaggggaaaacaacgacaaagaagaagaagaaaaaaaagacgaaacaagcaguagcucagaagcaaacagccgaugucaaacuccaauaaaaaugaaaccuaauauugaaccuccugaaaauguugaauggucaggagcagaagcaagcauguucagaguuuuaauaggaacauacuaugauaauuuuugcgcaauagcaagacuaauagggacuaaaacaugcagacagguauacgaauuccgagucaaagaaagcucaauaauagcaccagcuccggcugaagacgucgauacacccccaagaaaaaaaaaaagaaaacaucgauugugggccgcccacugcaggaaaauacaacuaaaaaaggauggaucaaguaaucacguauacaacuaucaaccuugugaccacccuagacaacccugugauucaucauguccauguguaaucgcucaaaauuuuugugaaaaauuuugucaaugcucaucagaaugucaaaauagauuuccaggaugcagaugcaaagcacaaugcaauacaaaacaauguccuuguuauuuagcaguaagagaaugcgauccagaucucuguuuaacaugcggagcggcggaccauugggauagcaaaaauguaucuuguaagaauugcaguauccaaagaggaucuaaaaaacaucuucuauuagcaccaucagauguagcgggauggggaauauuuaucaaagacccaguucaaaaaaacgaauucauaucagaauacuguggugaaauaauaucacaggacgaagcagauagaagggggaaaguauaugauaaauauaugugcaguuuucuauuuaaucuaaacaacgacuuuguaguagacgcgacgagaaaagggaauaaaauuagauucgcaaaucauucuguaaacccaaacugcuacgcuaaaguaaugaugguuaacggagaucaucgaauagguaucuuugcuaaaagagcaauacaaacaggggaagaacuguuuuucgauuaccgauauucacaagccgacgcuuuaaaguacguaggcauagaacgagaaauggaaauuccauaa

SEQ ID NO: 3694 - RNA, 2124 nt, Artificial Sequence
  AEN79481 variant
augggacaaacaggcaaaaaaucggaaaaaggaccaguaugcuggcgaaaaagggucaaaucagaauauaugagguuacgacaacuaaaaagauuuagaagggcagaugaaguuaaauccauguucucaucuaauagacaaaaaaucuuagaacgaacagaaauacuuaaucaagaauggaaacaaagaagaauacaaccaguacacauauuaacaagcguaaguaguuuaaggggaacaagagaggucgaagacgaaacuguauuacacaacauaccauauaugggagaugaaguacuagaucaagacggaacauuuauagaagaacuaauaaaaaacuaugacggaaaaguucauggagacagggaaugugguuuuauaaacgaugaaauauucguagaauuagucaaugcccuaggacaauauaaugaugacgaugaugaugacgauggagacgacccagaggaacgagaagaaaaacaaaaggaccuagaagaccauagagacgauaaagaaagucgaccaccaaggaaauucccuucugacaaaaucuucgaagcaauuagcucuauguuuccagauaagggaacagcagaagaauugaaagaaaaauacaaagaacuuacagaacaacaauuacccggagcacuuccaccagaauguacacccaauauagacgguccaaaugccaaaucaguacaacgagaacaaagccuacauucauuucacacgcuauuuugcagacguuguuucaaauacgauuguuuucuacacccauuccaugccacaccaaacacuuauaagagaaaaaauacagaaacagcauuagauaauaagccauguggaccacaaugcuaucaacaucuagaaggcgcaaaagaauucgcagcagcacuaacagcagaaagaauaaaaacaccaccuaaacgaccgggagguagaagacgaggaaggcucccaaacaauucaucacgcccaaguacaccaacaauaaacguauuagaaucaaaagauacugauagcgauagggaagcagguacagaaacaggcggcgaaaauaaugacaaagaagaagaagaaaaaaaagacgaaacuucaaguaguucugaagcaaauucuagaugucaaacaccaaucaaaaugaagccaaauauagaacccccagaaaauguagaauggucuggagcugaagcuagcauguucagaguccuaauaggaacauauuacgauaauuuuugugcaauagcaagacucauaggaacaaagacaugcagacaagucuacgaauuuagagucaaagaaaguaguauaaucgcaccagcacccgccgaagacguagauacuccaccaaggaaaaaaaaaagaaaacacagacuuugggcagcacacugccguaaaauccagcuaaaaaaagauggaucaagcaaucacguauacaauuaccaaccaugcgaccauccaagacaaccuugcgacagcagcugucccugcguaauagcccaaaacuucugcgaaaaauucugucaauguuccucagaaugccaaaacagauuuccaggaugcagaugcaaagcacaaugcaacacaaaacaaugcccauguuaccuugcaguaagagaaugcgacccagaucuuuguuuaacaugcggcgcagcagaucacugggauucuaaaaacguuaguuguaaaaauuguucaauccaaagaggaucaaaaaaacaccuauuacuagcccccucagauguagcaggauggggaauauuuauaaaagaccccguacaaaaaaaugaauuuauaucagaauauuguggcgaaauuauaagccaagaugaagcugacagaaggggaaaaguauacgauaaauauaugugcucguuucuuuuuaaccuaaauaaugacuucguaguggaugcaacacgaaaaggaaauaaaauaagauucgcaaaccauagcguaaaccccaacuguuacgcaaaaguaaugauggugaacggugaucauagaaucggaauauucgcaaaaagagcuauacaaacgggagaagaacuauucuucgauuacagauacucacaagcagacgcacuaaaauauguaggcauagaacgagaaauggaaauaccauaa

SEQ ID NO: 3695 - RNA, 399 nt, Artificial Sequence
  AAB87141 variant
augguagaagcauucugugcaacauggaaacuaacaaacucacaaaauuucgaugaauauaugaaagcauuaggaguaggauuugcaacaagacaaguaggaaacguaacaaaaccaacaguaauaauaucacaagaaggagauaaaguaguaauaagaacacuaucaacauuuaaaaauacagaaauaucauuccaauuaggagaagaauuugaugaaacaacagcagacgauagaaauugcaaaagcguaguaucacuagauggagauaaauuaguacauauacaaaaaugggacggaaaagaaacaaauuucguaagagaaauaaaagacggaaaaaugguaaugacauuaacauucggagauguaguagcaguaagacauuacgaaaaagcauaa

SEQ ID NO: 3696 - RNA, 765 nt, Artificial Sequence
  CAA36870 variant
auguggcaacuacuacuaccaacagcacuauuacuauuaguaucagcaggaaugcgaacagaagaucuaccaaaagccguaguauuccuagaaccacaaugguacagaguacuagaaaaagacucaguaacacuaaaaugccaaggagcauauucaccagaagacaacucaacacaaugguuccacaacgaaucacuaauaucaucacaagccucaucauacuucauagacgccgcaacaguagacgacucaggagaauaccgaugucaaacaaaccuaucaacacuaucagacccaguacaacuagaaguacacauaggaugguuacuacuccaagcaccaagauggguauucaaagaagaagacccaauacacuuaagaugccacucauggaaaaacacagcauuacauaaaguaacauaccuacaaaacggaaaaggaagaaaauacuuccaccacaacucagacuucuacauaccaaaagccacacuaaaagacucaggaucauauuucugcagaggauuauucgggucuaaaaacguaucaucagaaacagucaacauaacaauaacacaaggacucgcaguaucuaccauaucauccuucuuucccccaggauaucaaguaucauucugucuaguaaugguauuacuauucgcaguagauacaggacuauacuucucaguaaaaacaaacauaagaucaucaacaagagacuggaaagaucacaaauucaaauggagaaaagacccacaagacaaauaa

SEQ ID NO: 3697 - RNA, 873 nt, Artificial Sequence
  CCDS1232.1 variant
augggaggaggagcaggagaaagacuauuuacaucaucaugccuaguaggccuagucccccuaggacuaagaauaucccuaguaacaugcccacuacaaugcggaauaauguggcaacuacuacuaccaaccgcauuacuacuauuaguaucagcaggaaugagaacagaagaccuaccaaaagcaguaguauuccuagaaccccaaugguacagaguacuagaaaaagacuccguaacacuaaaaugccaaggcgcauacuccccagaagacaacagcacacaaugguuccauaacgaaucacuaauaucaucacaagcauccucauacuucauagacgcagcaaccguagaugacucaggagaauaccgaugccaaacaaaccucucaacacuaucugauccaguccaacuagaaguccacaucggauggcuauuacuacaagcaccuagauggguauucaaagaagaagacccaauacaccuaagaugccacucauggaaaaacaccgcauuacauaaagucacauaucuacaaaacggaaaaggacgaaaauacuuccaccacaacucagacuucuacauaccaaaagcaacauuaaaagacucaggaucuuacuucugcagaggacuauucggaagcaaaaacguaucaucagaaacaguaaacauaacaaucacacaaggacuagcaguuucaaccauaucaucauuuuucccacccggauaccaaguaucauucugccuaguaaugguauuacuauucgcaguagacacaggacuauacuucucuguaaaaacaaacauacgaucaucaacaagagacuggaaagaccacaaauuuaaauggagaaaagauccacaagacaaauaa

SEQ ID NO: 3698 - RNA, 807 nt, Artificial Sequence
  AAH74858 variant
augucacuaucauuccuacuacuacuauucuucucacaccuaauacuaucagccugggcacacggagaaaaaagacuagcaccaaaaggacaaccaggaccagcagccacugauagaaacccaagaggauccucaucacgacaaucaucaucuucagcaaugucuucuucaucagcaucaucaucuccagcugcaucacuaggaucacaaggaucaggacuagaacaaucaucauuucaauggucacccucaggacgaagaacaggaucauuauacugcagaguaggaauaggauuccaccuacaaauauauccagacggaaaaguaaacggaucacacgaagccaacaugcuaucaguauuagaaauauucgcaguaucacaaggaauaguaggcaucagaggaguauucagcaacaaauucuuagcaaugucaaaaaaaggaaaacuacacgcaucagcaaaauucacagacgacuguaaauucagagaaagauuccaagaaaacucuuacaacacauacgcauccgccauucacagaaccgaaaaaacaggaagagaaugguacgucgcccucaauaaaagaggcaaagcaaaaagaggaugcucaccaagaguaaaaccacaacacauaucaacacacuuucuaccaagauucaaacaaucagaacaacccgaacuaucuuucacaguaacaguaccagaaaaaaaaaaaccaccaucaccaauaaaaccaaaaauacccuuauccgcaccaagaaaaaacacaaauuccguaaaauacagauuaaaauucagauucggcuaa

SEQ ID NO: 3699 - RNA, 117 nt, Artificial Sequence
  AAB06462 variant
augagcacaagauguggagaagcaggaagagcaagaggaacacaaccacauagaggauacagagcacaaaaccaaccauauaaaaugcacuuaggaccaccaagacuagaagaauaa

SEQ ID NO: 3700 - RNA, 2466 nt, Artificial Sequence
  AAA59470 variant
auggucucauggggaagauuuauaugcuuaguagucguuacaauggcuacauuaucuuuagcuagacccucauuuagucuaguagaagauacuacacuagaaccagaagaaccacccacaaaauaucagauuucucagccagaaguauauguagccgcgccaggagaaucccuugaaguaagauguuuauuaaaagacgcugcaguaauauccuggacuaaagauggaguccaucuaggaccgaacaaucgaacuguauuaauuggugaauaucuacagauaaaaggagcaaccccacgagacucaggcuuguaugccuguacagccucacgcacaguagauuccgaaaccugguauuuuaugguuaaugucacagacgcaauuucaaguggagaugaugaagaugacacggacggagcugaagacuucguaagcgaaaauaguaauaacaaacgagcacccuauuggacaaacacagagaaaauggagaaaagacuacaugccguaccagcagcaaacaccguaaaguuuagauguccagccggugguaacccaaugccaacgaugagauggcuaaagaauggcaaagaauuuaaacaggaacacagaauaggcgguuauaaaguaaggaaccaacacuggucgcuaauuauggaaucaguaguaccuucagacaaagguaauuauaccugcguaguagaaaaugaauacggaucaauaaaccacacauaucaccuagacgucguagaaagaucuccgcaccgaccaauauuacaagcaggcuuaccagcaaacgcauccacaguaguaggaggagacguagaauuuguguguaaagucuauagcgacgcgcaaccacauauucaauggauaaaacacgucgagaaaaacggaucuaaauauggcccggacggacuacccuauuuaaaaguacuaaaagcagcaggaguuaauacaacagacaaagaaauagaaguauuauauauaagaaauguuacauuugaagacgcaggagaauauacgugcuuggccggaaauaguauaggaaucucauuccacagcgcauggcuaacuguauugccagcaccaggcagagaaaaggaaauaacagcaucaccagacuaccuugaaaucgcaauauauuguauagggguuuucuuaauagcaugcauggugguuacgguaauacuauguagaaugaaaaacacaacaaagaaacccgacuuuucaagucaaccagcuguacauaaauuaacuaaaagaauaccauuaagacgacaaguaacuguaagugcagaaaguucgucaucaaugaauagcaauacaccauuaguacgaauuacaacaagauuaucaaguacugcagauacuccaaugcuagcuggugucucagaauaugaauuacccgaagauccaaaaugggaauuuccaagggacaaauuaacauuaggaaaaccucuaggcgaaggauguuucggucagguaguaauggcagaagcaguggggauagauaaagauaaaccaaaagaagcaguuacaguagcaguaaaaaugcuaaaagaugaugccacagaaaaagaucucuccgacuuaguuucugaaauggaaaugaugaaaaugauagggaaacacaaaaacauaauaaaucucuuaggagcuuguacacaagacggaccauuauauguaauaguagaauaugcaucaaagggaaaccuaagagaauauuuaagggcuagacgaccuccaggaauggaauauucauacgacauuaaucgaguaccagaagaacaaaugacauuuaaggacuuaguuuccuguacuuaucaauuagcuagaggaauggaauaccuagcaagucaaaaaugcauacacagagauuuagcugcaagaaacguacuuguaacagaaaauaacguuaugaaaauagcugacuuuggcuuagcaagagauaucaacaauauagauuacuacaagaaaacaacaaaugguagacuaccagucaaauggauggcaccagaagcacuauucgaucgaguauacacacaucagucagaugucuggagcuuuggaguauuaaugugggaaauauuuacccuaggaggaaguccguacccgggaauaccaguagaagaacucuucaaacuauuaaaagaagggcacagaauggauaaaccagcgaauuguacaaaugaauuauacaugaugaugagagacugcuggcaugcuguacccucacaaagaccaacauucaaacaauuaguagaagauuuagacagaauacuaacauuaacaacaaaugaagaauaucuagauuuaagucaaccacuggaacaauauucacccucauauccugacacaagaucaucauguucaucaggugaugauucaguauuuuccccagauccaaugcccuaugaaccgugccugccucaauauccacauauuaacggaucuguuaaaacauaa

SEQ ID NO: 3701 - RNA, 1908 nt, Artificial Sequence
  EAW74574 variant
auggcuccaccauuacuuuuauuacuacuagcaucuggagcagcagcuuguccacuuccauguguaugucaaaauuuaucagaaucucuuucuacauuaugcgcacacagaggauuauuauuuguaccuccaaauguugauagaagaacaguggaauuaagauuagcugauaauuuuauccaagcucuaggaccaccugauuucagaaacaugacuggauuaguugaucuaacucuuucaaggaacgcaauaacaagaauaggugcaagagcauuuggugacuuagaaucgcuaagaucuuuacaucuagauggaaacagauuaguugaacuuggaacaggaucacugagaggcccuguaaaucuacaacauuuaauucuaucuggaaaucaacuaggaaggauagcaccgggcgcauucgaugauuuucuagaaucacuugaagacuuagaccucucuuauaacaaccuuagacaaguaccaugggcagguauaggcgcuaugccugcacuacauacauuaaaucucgaccauaacuuaauagacgcacuuccaccaggagccuuugcacaauuaggucaacuaaguagacuagaucuaacuucaaacagacuagcuacacuagccccugauccacuguuuagcagaggcagagaugcagaagcaucaccagccccucuaguucuuucauucucaggaaauccuuuacauuguaauugcgaauuauuauggcuaagaagauuagcuagaccagaugacuuagaaacuugugcuagucccccaggauuagcuggcagauauuuuugggcagucccagaaggcgaauuuaguugcgaaccaccacuaauagcaagacauacacaacgucuuuggguauuagaaggucaaagagcuacguugagaugcagagcucuuggcgauccggcaccuacaaugcauugggucggaccugacgauagauuaguaggcaauagcucuagggcacgugcauuuccaaacgguacuuuagaaauaggaguaacuggcgcaggagaugccgguggauauacauguauagcaacaaacccggcuggugaagcuacugcucguguugaauuaagaguucucgcucucccucacggggguaauaguucagcugaaggcggucggccaggaccuucggauauagcugcuucugcaagaacugcagcugaaggagaaggaaccuuagaaucagaaccagcuguacaaguaacggaaguaacugcaacaaguggauuagucucaugggguccaggaagaccagcugauccaguauggauguuucaaauacaauauaauuccucagaagaugaaaccuuaauuuacagaauaguuccggcaucaagucaucauuuucuauuaaaacaucuaguuccuggagcagauuaugacuuauguuuauuagcacuaucuccagcagcugguccaucagauuuaacagcaacaagauuauuaggaugcgcacacuuuaguacauuaccagcuucaccuuuaugucacgcuuuacaagcacacguacuaggaggaacacuaacaguagcugucggagguguauuaguagcagccuuauuaguauuuacaguagcacuauuagucagaggaaggggagcagguaaugguaggcuaccucuaaaacuuucucauguacaaucucaaacaaauggaggaccaaguccaacacccaaagcacauccuccccgauccccucccccaagaccacaaagauccuguucacuagaucuaggagaugcagguuguuauggauaugcccgaagauuaggaggagcaugggcuagaagaucccauucaguacacggaggauuauuaggcgccggaugcagaggagucggaggaucugcagaaagacuggaagaaagugucguauaa

SEQ ID NO: 3702 - RNA, 3297 nt, Artificial Sequence
  EAW96782 variant
augcccccuagacaaccaccucgccaggcuggagguggcuuaucacgagaauuugguaaacuauuaccugcauugucacauucuccucuaggaggucucggcagcggcagcgggucuguagccccaggacagggacgugcaggcgccaugggaucccgaacaccugaaucaccucuacaugcaguucaauuaagauggggaccuagaagaaggccgcccuuauugccacuucuacuauuauuacuaccuccuccaccgagaguaggagguuucaacuuagacgcagaagccccagcuguuuuauccggaccaccugguucuuucuuugguuuuucagucgaauuuuauagaccaggaacugauggaguaucuguauuaguuggcgccccgaaagcaaacacaucacaaccaggaguuuuacaaggaggagccgucuaccuaugcccauggggagcaucuccuacccaaugcacgccuauugaauuugacucuaaaggaagucguuuauuagaauccucccucucaucuagcgaaggugaagaacccguagaauauaaaucauuacaaugguuuggagcuacuguacgagcccauggauccagcauauuagcaugcgccccacuuuauucauggcgaacagaaaaagaacccuuaucugacccuguaggaacauguuaccugucaacagacaauuuuacuaggauacuagaauaugcaccuugucgaucggacuuuucuugggcagcaggacaaggcuauugccaagguggauuuuccgcagaauuuacaaaaacaggaagaguaguacucggaggaccgggcucauauuuuuggcaaggccaaauacuuagcgcgacacaagaacaaauagcugaaaguuacuauccagaauauuuaauaaaucuagugcaaggccaacuacagaccagacaagcaucaucaauauaugacgauucauacuuaggcuacucuguagcaguaggugaauuuaguggagacgauacagaagauuuuguagcaggaguuccaaaaggaaaucuuacauacggauauguaacaauacuaaacggaucagauauaagaucauuauauaauuucucaggugaacaaauggcaucauauuuuggauacgcaguagcagcaaccgaugucaauggugacggauuagaugaucuauuagucggagcaccauuacuaauggauagaacaccggauggaagaccccaagaaguaggacguguauacguauaucuucaacacccagcggguauagaaccaacgccaacucucaccuugacaggucaugaugaauuuggacgauuuggaucuucucuuacaccucucggagaucuagaucaagaugguuauaaugacguagccaucggagcaccuuuuggaggugaaacacagcaagggguaguauuuguuuuucccggagggccaggcggacuuggcucuaaacccucccaaguauuacaaccacuaugggcugcuagucauacaccagacuuuuucggaucggcacuacgaggcgguagagaccuugauggaaauggauauccagaccuaauaguagguucauuuggcgucgauaaagcugucguauauagagggcgucccauuguaagcgccucagcuucauuaaccauauucccagcaauguucaauccugaagaaagaagcugcucauuagaagguaauccuguagcaugcauuaauuuauccuuuuguuuaaacgcaucgggaaaacauguagcugauucaauaggauucaccguagaacuacaacuugauuggcaaaaacaaaaaggaggcguacgccgcgcacuauuccuugccucacgacaggccacacucacgcagacacuacuaauacagaauggggccagagaagacugcagagaaaugaaaauuuaucuaaggaaugaaucugaauuuagagacaaauugaguccaauacauauagcguuaaacuuuucuuuagacccacaagcaccaguugacucacauggauuacgcccagccuugcacuaucaaucaaaaucucgaauagaagauaaagcacaaauucuauuagauuguggcgaggacaauaucuguguuccggauuuacaguuagaaguauuuggcgagcaaaaucauguguauuuaggugauaaaaaugcacuaaacuuaacauuucaugcacagaacguaggagaagguggagcuuaugaagcugaauuacguguaacagcaccaccagaagcagaauauucugggcucguacgacauccagguaauuuuuccagucucaguugugacuauuuugcaguaaaccaaaguagauuacuuguaugcgaccuuggaaauccaaugaaagccggcgcuagcuuauggggcggccuaagauucacaguuccacaccucagggacacuaagaaaacaauacaauuugauuuucagauacuaagcaaaaaucuuaauaauagucaaucagauguggucucuuuucgucuaucaguagaagcacaagcacagguuacucuaaauggagugucuaaaccagaagcaguucucuuuccugucucagauuggcacccacgagaccaaccucaaaaagaagaagaucuggggcccgcaguacaccauguuuaugaacuaaucaaccaaggaccgucaucaauuagucaaggcguucuagaauuaucauguccacaagcucuagaaggccaacaauuguuauauguaacgcguguaacuggacuaaauugcacuacaaaccacccaauaaacccaaaaggauuagaauuagacccagaaggaucacuucaucaccagcagaaaagagaagcaccaucacgauccucagcaaguucaggaccccaaauucuuaaauguccagaagcugaaugcuuuagguuacgcugugaauuaggaccauuacaccaacaagaaucacaaucacuacaacuacauuucagaguuugggccaagacauucuuacaaagagaacaccaaccauuuucucuucaaugugaagcgguauacaaagcucucaaaaugccauacaggauauuaccaagacaauuaccgcaaaaagaacgacagguagcaacagcaguacaauggaccaaagcagaaggaucauauggagugccuuuauggauuauaauccucgcaauacuguucggucuacuguuacuuggauuacuuaucuacauucuuuauaaauuaggcuuuuucaaaagaucacuaccauauggcacagccauggaaaaagcacaauuaaaaccuccugcaacaucagaugccuaa

SEQ ID NO: 3703 - RNA, 3597 nt, Artificial Sequence
  EAX08808 variant
auggcugaacacccgccacuacuugauacgacacaaaucuuaucaucagauauaagccuacuuuccgccccaauaguuucggccgaugguacccaacaaguaauauuaguccagguuaauccuggcgaggcuuuuacgauuagaagagaagauggccaauuccaauguauaaccggaccagcgcagguaccaaugauguccccaaacggcucaguacccccgauuuacgucccaccaggauacgcaccucaaguaauugaagacaauggaguacgaagaguaguaguagucccccaagcuccagaauuucauccgggaucacacacuguacuacaccgaucaccucauccacccuuaccaggauuuauaccgguaccuacuaugaugccaccgccuccgagacacauguacucaccuguaacaggcgcaggagauaugacaacacaauauaugccucaauaucaaucaucacaaguauauggagauguagaugcccauucaacacauggaagaucuaauuuuagagaugaaagaagcuccaagacauacgaaagacuacaaaagaaacuuaaggacagacagggaacacaaaaagauaaaaugucuagcccaccaucuaguccucaaaagugucccagcccaauuaaugaacacaauggacugauaaaagggcaaauagcugguggcauaaauacaggaucugcaaaaauaaaaucuggcaagggaaaaggagggacucaaguagauacugaaauugaagaaaaagacgaagaaacaaaagcguuugaagcccuauugaguaauauaguuaaaccaguggcuucagauauucaagcacggacuguaguuuuaacauggucaccaccaucaucucuaauuaauggugaaacagaugaaaguucuguccccgaacuuuauggauaugaaguauuaauaucaucaacuggcaaagaugguaaauacaaaagugucuacguaggcgaagaaacaaacauaacuuuaaaugaucuuaaaccagcuauggauuaccaugcuaaaguacaagcagaauacaauaguaucaaaggcacaccaucagaagcagaaaucuucacaacauuauccugcgaacccgauauuccuaauccuccgcgaaucgcuaauaggacuaaaaauagucugacacuccaauggaaagcuccaucggacaacggaaguaaaauacaaaacuucguacuagaaugggacgaaggaaaagguaauggcgaguuuugucaguguuauaugggaucacaaaaacaauuuaaaaucacuaaacuguccccugcaaugggaugcaaauuuagauuaucagcuagaaacgauuacgguacuucuggguuuucagaagaaguucuauacuauacaagcggcugcgcuccuucaaugccagcuagucccguccucacaaaagcaggcauuaccugguuaagucuacaauggucaaaaccaucgggcacaccaucagaugaaggaauuucauauauacuagaaauggaagaagaaacauccggauauggauuuaaaccuaaguacgauggagaagacuuagcuuauaccgugaaaaaccuaagaagaucuaccaaauacaaauuuaaaguaauagccuacaauagcgagggaaaaaguaauccuuccgaaguuguugaauuuacaacauguccagauaaaccaggaauaccagugaaaccuucgguuaaaggaaaaauacacagucauucauuuaaaauuacaugggauccucccaaagacaaugguggcgcuacaauaaauaaauacguuguagaaauggcugagggaagcaauggaaauaaaugggaaaugauauacucaggagcaacuagagaacaccuaugcgaccgacuaaauccagguuguuuuuaccgacugagaguauauuguauaagcgauggaggccaaucugcaguuagcgaaagucuuuuaguucaaacuccugcaguaccaccuggaccauguuuaccaccgagauuacaaggaagaccaaaagcaaaggaaauacaacuuagauggggaccaccauuaguugacggcggaucaccaauaucaugcuauucgguagaaaugagcccaauagaaaaagacgaaccacgagaaguauaccaagggucugaaguagaauguacaguaaguuccuuauuaccaggaaaaacauacucauuccgucuuagagccgcaaacaaaaugggguuuggaccauuuagugaaaaaugcgauauuaccacagcacccggaccaccagaucaaugcaaaccaccacagguaacuuguagaucugcaaccugcgcacagguaaauugggaaguuccacucaguaauggcacagacguaacagaauauagauuagaauggggaggaguagaaggaagcaugcagauauguuauugcgguccaggauuaucauaugaaauuaaggggcuaucgccagcaaccacauacuauuguagagugcaagcucuuuccguaguuggagcagggccauuuagugagguuguugcauguguuacaccuccaucaguaccaggcauugugacaugucuccaggaaauuucagacgaugaaauagaaaacccacauuacucccccucaacauguuuagcuauaucgugggagaaaccaugcgaccauggaucagaaauauuagcauauucaauagacuuuggagacaaacaaucucuuaccgucggcaaaguaacauccuauaucauuaauaaccuacaaccugauacuacguacagaauacgaauacaagcacuuaacucauuaggagcaggcccauuuucacacaugauuaaauuaaaaacaaaaccacugccuccagauccuccaagacucgaauguguggcuuuuagccaucaaaaccucaaguugaaauggggugaaggaacacccaaaacucuaucaacagauagcauacaauaucaucuccaaauggaagacaaaaaugggagauuugucucacuuuauagaggucccugccacacauauaaaguacaacgacugaacgaaaguacuucauacaaauuuuguauacaggcuugcaacgaagcaggagaagguccuuuaagucaagaauacauauucacaacaccaaaaagcguacccgcagcauuaaaagccccuaaaauagaaaaggucaacgaccauauaugcgaaauuacaugggaaugucuucaaccaaugaaaggagacccaguuauauauagccuacaagucauguuaggaaaagacuccgaauuuaaacaaauuuauaaaggccccgacucgaguuuuagauacucuagucuacaguuaaacugugaauauagauuuaggguuugugcaaucaggcaaugccaagacucacuaggacaucaagaucuuguaggaccguauagcacaacggucuuauucauaagucaacggacagaaccacccgcuucaacuaauagagauacaguagaaucuaccagaacacgccgcgcgcuaagcgaugagcaaugcgcagcagugauccucguacuauuugcauucuuuucaauuuuaaucgcuuuuauaauacaauacuuuguuauaaaauaa

SEQ ID NO: 3704 - RNA, 3429 nt, Artificial Sequence
  EAX08809 variant
augucugguccggcccaagugccuaugaugucuccaaacggaucaguaccuccgauauaugucccacccggcuacgcuccacaagucauagaagauaacgguguuagaagggucguaguaguaccucaagccccugaguuccacccagguagucacacuguucuacaccgaucaccucauccacccuuaccaggguucaucccugucccuacaaugaugccucccccacccagacacauguacucccccgucacuggagcaggagauaugaccacacaauauaugccacaauaucaaucuagccaaguuuacggagacguagaugcucacuccacacauggacgcaguaauuuuagagaugaacgaucuuccaaaacauacgaaagacugcaaaagaaauugaaagauagacaagguacacaaaaagauaaaaugagcaguccuccaucgucaccacaaaaauguccuucaccaauaaaugaacauaaugggcuuauuaaaggacaaauagcaggaggaauaaauaccgggucagcaaaaauaaaaucagguaaaggaaaagguggaacacagguagauacagaaauagaagaaaaagacgaagaaacuaaagccuuugaagcucuacucucuaacauaguaaaaccagucgcuucagauauucaagcaagaacaguuguauuaacauggucaccucccucuucccuaauuaauggcgaaacggaugaaucaagcgugccugaacuauacggcuacgaaguccuaauaucuucaacugguaaagacggaaaauauaaaucuguauauguaggagaagaaacaaacauaacucuaaacgacuuaaaaccagcaauggacuaucacgcaaaaguacaagccgaauacaacucaauaaaaggcacuccaucugaagcagaaauauucacuacauuaaguugugaacccgauauuccaaauccuccccgcauugcaaacagaaccaaaaacucccuaacauuacaauggaaagcaccgucugauaauggguccaaaauacaaaauuuuguauuagaaugggaugaaggaaagggaaauggagaauuuugccaaugcuacaugggaucacaaaaacaauucaaaauaacaaaacucuccccugcaauggguuguaaauuuagacucucagcacguaaugauuauggaacaagcgguuuuuccgaagaaguacucuauuauacaaguggaugugcaccauccaugccagcuuccccaguauuaacuaaagcaggaaucaccugguuaucauugcaauggucaaagccuaguggcaccccaucugaugaaggaauaucuuauauacuagaaauggaagaagaaacauccggcuauggauuuaaaccuaaguacgacggagaggaucuagccuacacaguuaaaaaucuuaggagaucuacuaaauacaaauuuaaaguaauugcauauaacagcgaagguaaaaguaauccgagugaagugguagaauuuacuacaugcccagauaaaccaggaaucccuguaaaacccagcguaaaagggaaaauucauucucauucuuuuaaaauaacaugggacccaccaaaagacaaugggggagcgaccaucaauaaauauguaguagaaauggcagaaggaucuaacgguaacaaaugggaaaugauauacucuggugcuacacgugaacauuugugcgaccgccuaaacccaggauguuuuuaucgauuaagaguauacugcauaucugacgguggacaaucagcgguaucugaaucucuauuaguucagacaccagcaguaccuccagggccaugucuucccccaagauuacaagguagaccaaaagcaaaagaaauccaauugcgcugggguccaccucucgucgacgguggauccccaauaaguugcuauucgguagaaaugucgccaauagaaaaagaugagccaagagaaguauaucaagguagcgaaguugaaugcacuguaucgaguuuauugcccggcaaaacuuacaguuuccgacucagagccgcaaacaaaaugggauuuggacccuucuccgaaaaaugcgacauuacuacggcaccgggaccuccagaccaauguaaaccaccucaaguaacaugccgcuccgcuacuugugcacaagucaacugggaaguaccacuuucuaacgguacagauguaacugaguacagauuagaauggggcggagucgaaggaucaaugcaaauuugcuacugcggaccaggauuaaguuacgaaauaaaagguuuaucuccagcuacuacauauuauugcagaguacaagcccuaucuguaguaggagcaggaccauucuccgaaguaguggcauguguaacaccaccaagcguacccggaauuguaacaugcuuacaggaaauaucagacgaugaaauagagaauccucauuauuccccgucaacaugucucgcuauauccugggaaaaaccuugcgaucauggcuccgaaauauuagcauacuccauagauuuuggagacaaacaaucauuaaccguuggaaaagucacgucauauauaauaaauaacuugcaaccagauacaacauauagaauaagaauacaagccuuaaauucauuaggagcagguccuuuuucacacaugauaaaguuaaaaaccaaaccucuuccuccugaucccccucgucuggagugcguugcguucagccaccaaaaccugaaacuuaaauggggagaaggaaccccaaaaacacucaguaccgacucaauccaauaccaucuacaaauggaagauaaaaacggaagauuuguaaguuuauauagaggacccugccauacuuacaaaguucaacgacuuaacgaaucaacgucuuacaaauuuuguauucaagcauguaacgaagcaggagaagguccauuaucacaagaguauauuuucacuacuccaaaaucuguaccugcagcucuuaaggcaccaaaaaucgaaaaaguaaacgaccacauaugcgaaauaacuugggagugccugcaaccuaugaaaggugacccaguaauauauucguuacaaguuauguuagguaaagauagcgaauuuaaacaaauauauaaaggcccugacucaucuuucagauauucaucauuacaauuaaacugugaauauagguuuagaguaugcgcaauuagacaaugccaagacucacuaggacaucaagauuuaguaggaccauacucaacaaccguacuuuuuauaucacaacgaaccgaaccaccagcaucaacaaauagagauacgguagaaucaaccagaacaagacgugcauuaucagacgaacaaugugcagcaguaauucuuguacucuuugcguucuuuagcauauuaauagcauuuauaauucaauauuuuguaauaaaauaa

SEQ ID NO: 3705 - RNA, 1020 nt, Artificial Sequence
  EAW49214 variant
augccaccaaguaaaccacauccaccaguaguaggaaaaguuacgcaucauagcauagaauuauauugggaccuagaaaaaaaagcaaaaagacaaggaccacaagaacaaugguuuagauuuagcauagaagaagaagaucccaaaaugcauacauauggaauaauauauacaggauacgcaacaaaacacguaguagaaggauuagaaccaagaacauuauacagauuuagauuaaaaguaacaucgccaucaggagaaugugaauacaguccauuaguaagugugaguacaacgagagaaccaauaaguucagaacaucugcauagagcaguaaguguaaaugacgaagacuuauugguaaggauauuacaaggaggaagaguaaaaguagacguuccaaauaaauuuggauuuacagcauuaaugguggcagcacagaaaggauacacaagguuaguaaaaauauuaguaaguaaugggacggauguaaaccuaaaaaauggaagcggaaaagauaguuuaauguuagcauguuacgcaggccaucuagauguaguaaaauaucuaagaagacacggagcaaguuggcaagcaagagauuuaggaggauguacggcauuacauugggcugcagauggaggacacuguagcguaauagaauggaugauaaaagacggaugcgaaguagauguaguagacacaggaucaggauggacaccauuaaugagagugagcgcaguaagcggaaaucaaagaguggcaagcuuauuaauagacgcaggagccaacguaaauguaaaagauagaaauggaaaaacaccauuaaugguagcaguauuaaauaaucaugaagaauuaguacaauuauuauuagauaaaggagcagaugcaaguguaaagaacgaauucggaaaagguguauuagaaauggcaagaguauuugacagacaaucagucguaaguuuacuagaagaacgaaaaaagaaacaaaggccgaaaaaaucauguguauguuaa

SEQ ID NO: 3706 - RNA, 3150 nt, Artificial Sequence
  BAF84259 variant
auggguaguaggacgccugaaucaccacuacaugcaguucaauuaagguggggacccagaaggagaccuccucuauuaccacuauugcuacuucuacuaccaccuccaccccgaguaggagguuucaaucuugaugcggaagcacccgcaguauuaaguggaccacccgguaguuucuuuggauuuucuguagaauuuuaccgacccgggacagauggugugucaguauuagucggagcacccaaggcaaacacaagucaacccggagucuuacaagguggagcugucuauuuauguccauggggagcgucaccuacucaaugcacaccaauugaguuugauucuaaaggaagucgucuauuagaaucaucauuaagcagcagugaaggugaagaaccaguugaauauaagagucuccaaugguucggcgccacagucagagcucauggcucaucaauucucgccugugcuccacuauauucauggagaaccgaaaaagaaccacuuucagauccaguuggcacauguuaccuuucuacugauaauuucacacgaauacuagaauaugccccuugcagaucggauuuuucuugggcugcaggacaagguuauugucaaggagguuucagcgcugaguucaccaaaacaggccguguaguucuuggaggaccaggcucauauuucuggcaaggucaaauauuaagugcaacacaagaacaaauugccgaauccuacuauccagaauaccuaauaaacuuaguacaaggucaauuacaaaccagacaagccucuucaauauaugaugauaguuaucuaggauacucaguagcaguaggugaauuuuccggagaugauacagaagauuuuguugcaggagucccuaaagggaaccucacauauggauacgucaccauucuaaauggaagcgacauaagaagucuuuauaacuuuucaggagaacaaauggccucuuacuuugcuuaugcaguagccgcaacagacguaaacggagacggauuagacgaucuuuuaguuggagcaccauuacuaauggaucgcacuccggauggaagaccacaagaaguaggucgcguuuaugucuacuugcaacauccagcaggaauagaaucuacuccuacauuaacguuaacaggacaugacgaauuuggcagauucgguaguucacuaacaccauuaggugacuuagaucaagaugguuauaaugaugucgcaauuggagcaccuuuuggaggagaaacgcaacaaggaguaguuuuuguauucccaggaggcccaggcgguuuagggucaaaacccucucaaguauuacagccucucugggcggccucacacacaccagacuuuuucgguucugcacuaagaggaggacgugaucuugauggaaauggauacccagaucuaauuguaggaucauucggagucgauaaagcaguuguuuacagaggaagaccuauuguaucagcaucagcaucacuuacaauauucccagcaauguuuaauccagaagaaagaucauguuccuuggaaggaaaucccgucgcuuguauuaaccuaaguuuuugcuuaaaugcuucaggaaaacauguugcagacuccauuggauuuacagucgaacuacaacuugauuggcaaaaacaaaaagggggaguucgccgagcucucuucuuggccucucgacaagcaacacugacucaaacacuacucauucaaaauggagcucgcgaagauugcagagaaaugaaaauauauuuaagaaaugaaucugaguuuagagauaaauuaucaccaauccauauugcccuaaauuucucacuagacccucaggcuccagucgacagucauggacuucgacccgcauuacacuaucaaucaaaaucaagaauugaagacaaagcccaaauacuauuagguuguggugaagacaacauauguguaccagaucuacaauuagaaguauuuggcgaacaaaaucacguauaccugggagauaaaaaugcacuaaauuuaacauuccaugcccaaaacguuggagaaggaggugcuuaugaagcugaauuacgcguuaccgcaccuccagaagcagaauauucaggucuaguacggcaucccggaaauuucaguagucucaguugugauuauuuugcaguuaaucaaucacguuuauugguaugugaucuuggaaacccaaugaaagcaggagcaucauuguggggaggauuaagauucacgguuccacauuuacgugauacuaagaaaacgauacaauuugacuuccaaauucucuccaaaaauuuaaauaauucacaaagugauguaguaucuuuccgcuugaguguagaggcacaagcgcaaguaacacugaacggcguaaguaaacccgaagcaguucuuuucccuguuuccgauuggcauccaagagaccaaccccaagaagaagaagauuuagguccagcaguacaucauguauaugaauuaauaaaccaaggcccaucaucaauuucccaagguguguuagagcucagcugcccacaggcauuagaaggucaacaauuauuauauguaacacgaguaacaggacuaaauuguacuacuaaucaccccaucaacccaaaaggauuagaauuggauccugaaggaucgcuacaucaucaacaaaaacgggaagcaccaucccgauccagugcauccuccggaccacagauauuaaaauguccagaagccgaauguuuuagacugcguugcgaacuuggaccccuacaucaacaagagagucaaaguuugcaacuucauuucagaguuugggcaaaaaccuuuuuacaaagagaacaccaaccauucaguuuacaaugcgaagcugucuauaaagcucuaaaaaugccguacaggauacuaccucgccaacugccacaaaaagaaagacaaguugccacggccguacaauggacuaaagcagaaggaucauacggcguaccuuuauggauuauaauuuuagcaauauuauuugguuuguuauuauuaggucuucuuauauauauacuuuauaaacuaggcuuuuucaaaagaagccuaccauauggaacagcaauggaaaaggcccaauuaaaaccaccagcaacaucagacgcuuaa

SEQ ID NO: 3707 - RNA, 3150 nt, Artificial Sequence
  BAG35324 variant
augggcucacgaacaccagaaucaccauuacacgcaguucaacuaagauggggaccuagaagaagaccgccauuacucccccuuuuacuucuacuauuaccaccuccuccacgcguaggaggauuuaaucuugacgccgaagcuccugcuguuuugucaggaccaccagguucauuuuucggguucaguguugaauuuuacagacccgguacagauggcgucucaguccuuguaggagcuccaaaagcuaauacuucucaacccggaguccuacaagggggugcuguuuacuugugcccauggggagcuaguccaacacaauguacuccaauugaauuugacaguaagggaagccgauuacucgaaucaucacuuucaucaagcgaaggagaggaaccugucgaauacaaaaguuuacaaugguucggagcaacaguuagagcacaugggucuucaauauuagcaugcgcuccuuuauauaguuggcguaccgaaaaagaaccccuaagcgauccaguaggaacauguuaccuauccacagauaauuucacaaggauucucgaauacgcaccauguagauccgauuuuucgugggcugcaggucaagguuauugucaaggaggauuuucugcagaauuuacaaaaaccggcagaguaguacuuggaggcccaggaucguacuuuuggcaaggacagauauuaucagcaacccaagaacaaauugcugaaaguuauuacccugaguauuuaauaaacuuaguacaaggacaguuacaaacaagacaagccucaaguauauacgaugacuccuauuuaggauauuccguggcuguaggugaguuuuccggagaugacacagaagauuucguagcugguguacccaaagguaacuuaacauaugguuauguaacuauacucaauggaagugauauacgaucauuauacaauuuuaguggagaacaaauggcuagcuauuucggauaugcagucgcugcaacugauguaaauggugaugggcuagaugaucucuuaguuggagcaccuuuauuaauggaccgaacaccugacggacguccucaaggaguugguagaguguauguguacuuacaacauccugcaggaauagaaccaacgccgacauuaacacuaacaggucaugaugaguucggaagauucggaaguucacuuacuccucuaggugaccuagaccaggacgguuacaaugacguagcaauaggugcgccguuuggaggugaaacacaacaaggaguaguuuucgucuuuccaggagguccugguggguuaggaucaaaacucucacaaguauuacaaccucuaugggcagcaucacauaccccagacuuuuucggaucugcacuaagaggaggcagggauuuagaugguaacggauacccagaccuaauuguaggaucauuuggaguugacaaagcaguaguauaccguggcagaccuauuguuagcgcgagugcaagucucacaauuuuuccugcuauguucaauccggaggaacgaucauguuccuuagaaggaaacccaguagcauguauaaauuuaucauucuguuuaaaugcaagcgguaaacauguagccgauuccauaggcuuuacuguugaacuucaauuggauuggcaaaagcaaaaaggaggaguacgacgugcacucuuucuggcauccagacaagcaacucuaacacaaacauuauuaauacaaaacggagcacgugaagacugcagagaaaugaaaauauaucuuagaaacgaaucagaguuccgagauaaauuaucaccuauucauauagcauugaauuuuucuuuagauccccaagccccagucgauagucauggucuacgaccugcuuuacacuaccaaucaaaaucgcgaauugaagauaaagcgcaaauauugcuagauugcggagaagauaauauaugugucccggaccuacaacucgaaguauucggugaacaaaaccacguauacuuaggcgacaaaaaugcccuaaaccuaacuuuccacgcacaaaacguaggagaagguggagccuacgaggcugaacuaagagucacagccccaccugaagcggaauauuccggauuaguaagacaucccggcaauuuuucaucacuaucuugugauuauuucgcaguuaaucaaucccgccugcuagucugcgaccuggguaacccaaugaaagcaggagcaagccuauggggaggguuaagauucaccguuccacaucuaagggauacuaagaaaaccauccaguuugacuuucagauucuuucuaaaaaucuaaacaauucccaaucagauguuguaaguuuuagauuauccguagaagcacaagcacaaguaacauuaaauggcgucucaaaaccagaagcaguauuauuuccaguaucagauuggcauccaagagaucaaccacaaaaagaagaagaccucggacccgcuguccaucauguuuaugaauuaauuaaucaagguccuucaucaauaucucaagguguccuugaauuaucuuguccucaagcacuggagggacaacaacuucuauacguuacucgcgucacaggauuaaauuguacaacuaaccacccuauaaaucccaagggauuagaauuagacccugaaggcucguuacaucaucaacagaaaagagaagcaccuaguagaagcagugcaucgaguggcccacaaaucuuaaaauguccugaagccgaauguuucaggcuaagaugugaacuaggacccuugcaccaacaagaaagucaaucauuacaacuacauuuccgaguaugggcgaagacguuccuacaaagggaacaucaaccauuuuccuuacaaugugaagcaguauauaaagcauuaaagaugccuuauagaauauuaccccggcaauuaccacaaaaagagagacaaguagccacugccguucaguggacgaaagcagaaggaucauaugggguaccauuauggauaauuauuuuagcaauacuauuuggucuacuacuauuaggacucuuaauauauauacuuuauaaauuagguuucuuuaaaagaagucuuccuuacggaacugcuauggaaaaagcacaacucaaaccacccgcaacuagcgacgcauaa

SEQ ID NO: 3708 - RNA, 1401 nt, Artificial Sequence
  BAG54537 variant
auguuaucacuacgccaaagaaugaugcacgcuagauuuagaaauccacuaucaagacaaccagcaagaccaucauaccgacaaggcuauaacggacgccccaacguagaaggaaaaguuuuaccaggcucaaauggaaaacccaauggacaaagaauaaucaacggaccucaaggaaccaaauggguaguagaccuagaucgaggccucguacuaaacgcagagggacgauauuuacaagacucacacggcaacccauuaagaauuaaauuaggaggcgacggaagaacaauaguagaccuagaaggaacaccagucguauccccugacggcuuaccacuauuuggacaaggaagacacggaacaccacuagcaaacgcacaagacaaaccuauucuaucauuaggaggaaaaccacuuguaggauuagaaguaauaaaaaaaacaacacauccaccaacaacaacaaugcaacccaccacaacaaccaccccauuaccaaccacaacaacaccaagaccaacaacagcaaccacaagaagaacaaccaccagaagaccaacaacuacuguacgaacuacaacaagaacaacaacaacaacaacaccaaaaccaacaacuccaauacccaccugcccaccuggaacccuagaacgacacgaugacgacggaaacuuaauaauguccucaaacggaauaccagaaugcuacgcagaagaagacgaauuuuccggacuagaaacagauacagcagucccaacugaagaagcauauguaauauacgaugaagacuaugaauucgaaacaucaagaccacccacaaccacagaaccaucaaccacagcaacaacucccagaguaauaccagaagaaggagcaauaucuucauuccccgaagaagaauuugacuuagcaggacgaaaacgauuuguagcacccuacguuacuuaccucaacaaagacccaucagcacccugcucacuaacugacgcuuuagaucacuuccaaguagauucacuagacgaaauuauacccaacgaucuaaaaaaaucagaccuacccccacaacacgcaccacgaaacauaaccgucguugcaguagaaggcugccauucauucguaauaguagauugggacaaagcaaccccaggagaugucgugacaggauaccuaguauauagcgcuaguuacgaagacuucauccgaaauaaaugguccacacaagcaucaucaguaacccaccuaccaauagaaaaucuaaaacccaacaccagauacuacuucaaagugcaagcucaaaacccacacggauacggaccuauuucaccauccguuucauucgucacagaaucagauaacccacuucuaguaguuagaccaccagguggagaaccaauauaa

SEQ ID NO: 3709 - RNA, 471 nt, Artificial Sequence
  BAG58437 variant
auggaagaacaaagaaacgaagaaauacaaucauucauauacucacuaaaacaaaugcuacuaaacguagaagcaaacucagcaaaaguacaagaagaccuagaagcagaauuccaaagccuauucucacuacuagaagaacuaaaagaaggaaugcuaaugaaaauaaaacaagacagagcaucacgaaccuacgaacuacaaaaccaacuagcagcaugcacaagagcacuagaaagcucagaagaacuauuagaaacagccaaccaaacacuacaagcaauggacucagaagacuucccacaagcagcaaaacaaauaaaagacggaguaacaauggcaccagcauucagacuaagccuaaaagcaaaaguaagcgacaacaugagccaccuaaugguagacuucgcacaagaaagacaaaugcuacaagcacuaaaauuccuaccaggagaaagaggaacacacuaa

SEQ ID NO: 3710 - RNA, 921 nt, Artificial Sequence
  BAH14721 variant
augauauucgaagaacauggauuuagaagaacaacaccaccaacaacagcaacaccgauaagacauagaccaagaccauaucccccaaauguaggacaagaagcauuaagccaaacaacaauaaguugggcaccauuucaagauacaucagaauacaucauaucaugucacccaguagguacagaugaagaaccauuacaauuuagaguaccuggaacaucaacaagugcaacauuaacaggacuaacaagaggagcaacauauaauauaauaguagaagcauuaaaagaccaacaaagacauaaaguaagagaagaaguaguaacaguaggaaauucaguaaacgaaggauuaaaccaaccaacagaugauucauguuuugauccauauacaguaagucauuacgcagugggugacgaaugggaaagaaugagugaaucaggguucaaauuacuaugccaauguuuaggauuuggaucaggucauuuuagaugcgauagcucaagauggugccaugauaauggaguaaauuauaaaauaggagaaaaaugggacagacaaggagaaaauggacaaaugaugucauguacauguuugggaaauggaaaaggagaauuuaaaugcgauccacaugaagcaacauguuaugacgacggaaaaacauaucacguaggagaacaauggcaaaaagaauaucuaggagcaauaugcucuugcacaugcuuuggaggacaaagaggauggagaugugauaacugcagaagaccaggaggagaaccaaguccagaaggaacaacaggccaaucauauaaccaauauagccaaagauaccaucaaagaacaaauacaaauguaaacugcccaauagaauguuuuaugccuuuagauguacaagcagaucgagaagacucaagagaauaa

SEQ ID NO: 3711 - RNA, 1920 nt, Artificial Sequence
  BAG61560 variant
auggaaaaaauucuauuuuaccucuuucucauaggcauagcaguaaaagcacaaauuugccccaaacgaugcgucugccaaaucuuaucuccaaaccuagccacauuaugcgcaaaaaaagguuuauuauuuguacccccaaauauagaucguagaacaguagaacuaagacuugcagacaacuucguuacuaacauaaaaagaaaagauuucgcaaauaugacuucgcuaguagaccucacacuaucucgcaacacaauaucauucauaacaccacacgcauucgcagaccucagaaauuuacgcucacuccaccucaacucaaaccgacuaacaaaaauaacaaaugacauguucagcggacuaagcaauuuacaucauuuaauacuaaacaacaaucaacuuacacucauauccucgacagccuucgacgacgucuuugcccuugaagaacuagaccuauccuacaauaaccuagaaacuauaccaugggacgcaguagaaaaaaugguaucucuacacacauuaucauuagaucauaauaugaucgacaauauaccaaaaggcacguuuucacacuuacacaaaaugacaagacuagacgucacuucaaacaaacuucaaaaacucccacccgacccacuauuccaacgugcucaaguacuagcaacaagcggaauaauaagcccuucaacauucgcacuaucuuuuggcggaaacccccuacacugcaauugcgaacuacucuggcuuagacgacuauccagagaauaugaucucgaaaccugcgcaucaccaccccuccuaacaggaagauacuuuuggucaauacccgaagaagaauuccuuugcgaacccccucuaauaacacgccauacacaugaaaugcgaguauuagagggucaacgagcuacccuacgaugcaaagcaagaggugacccagaacccgcuauucacuggauaucuccagaaggaaaacuuaucucaaaugcaacuagaucauuaguuuaugacaauggaacccuagacauccuaauuaccacaguaaaagauacuggagcauucacauguauagcaagcaacccagcaggcgaagcaacacaaauaguagauuuacacauaauaaaacucccucaucuuuuaaauucaaccaaccacauacaugaaccugacccagguuccuccgacauaucaacauccacaaaauccgguucuaacaccucuuccucaaaugacggaauaacuucccuaacagcaacgagagucguaggcugcauacaauucacaacagaacaagauuacguaagaugucacuucaugcaaucucaauuuuuaggcggaaccaugauaauaaucauagggggcauuauaguagcaucuguacuuguauucauaaucauacuuaugauaagauauaaaguaugcaauaacaacggucaacacaaaguaacaaaaguuuccaacguuuauucacaaacaaacggagcacaaauucaaggaugcuccguaacccuaccacaaucaguaucuaaacaagccgucggucacgaagaaaacgcucaauguuguaaagcaacauccgacaacgucauacaaucaucagaaacaugcucuucacaagacucagccaccacaaccucagcucuucccccuucuuggacaucauccacauccguaucccaaaaacaaaaaagaaaaacaggaaccaaaccaucaacugaaccacaaaacgaagcgguaacaaacgucgaaucucaaaauacaaacagaaauaacucaaccgccuuacaacuagcaucacguccccccgauucuguaacagaaggaccaaccucaaaaagagcacacauaaaaccaaacgccuuacucacuaacguagaccaaauaguacaagaaacacaacgacuggaauuaaucuaa

SEQ ID NO: 3712 - RNA, 1014 nt, Artificial Sequence
  BAG61984 variant
augauauuugaagaacacggauucagaagaacaacaccaccaaccacagcaacacccauaagacacagaccaagacccuauccaccaaauguaggcgaagaaauacaaauaggacacauaccaagagaagacguagacuaucaccuauauccacacgguccaggacuaaauccaaaugcaucaacaggacaagaagcacuaucacaaacaacaauaucaugggcuccauuucaagacacaagugaauauauaauaucaugucauccaguaggaacugaugaagaaccacuacaauuuagagucccaggaacaucaacaucagcaacacucacaggacuaacuagaggagcaacauauaacauaauaguugaagcacucaaagaccaacagagacacaaaguaagagaagaaguaguaacaguaggaaauaguguaaacgaaggauuaaaucaaccaacagacgauucaugcuucgacccauauacaguaucacauuaugcaguaggagacgaaugggaacgcaugagugaaucaggauuuaaacuauuaugucaaugcuuaggauuuggaagcggucauuucagaugcgauaguagcagauggugccacgacaauggaguaaacuauaaaauaggagaaaaaugggauagacaaggugaaaauggacaaaugaugucauguacauguuuaggaaauggaaaaggagaauuuaaaugugacccacaugaagcaacauguuaugacgauggaaaaaccuaccacguaggagaacaauggcaaaaagaauaccuaggagcuauuugcucuugcacaugcuuuggaggacaaagaggauggagaugugacaauuguagaagaccaggaggagaaccaagcccagaaggaacaacaggacaaucauauaaccaauacucacaaagauaucaucaaagaacaaauacaaauguaaauugcccaauagaauguuuuaugccauuagauguacaagcagauagagaagacucaagagaauaa

SEQ ID NO: 3713 - RNA, 3045 nt, Artificial Sequence
  BAG62013 variant
augcgagucaccugggcaccuccgccaaguaucgacuuaaccaauuucuuaguaagauacucacccgugaaaaaugaagaagauguagcugaacuaaguauuucuccaucagacaaugccguaguacucacaaaccuacuuccaggcacagaguacguaguaagugucagcucaguauaugaacaacaugaaucaaccccucuccguggaagacagaaaacuggucuagauuccccuaccgguaucgacuucuccgauaucaccggaaacagcuuuacaguacauuggauugcaccgagagcaacaauaacaggauaccgaauaagacaucacccagaacacuuuucagguagaccaagggaagauagaguuccacauucccguaauucuauaaccuuaacaaauuuaacaccaggaacagaauaugucgucucgauaguggcccucaacggucgagaagagucaccacuacucauuggacaacaaucaacaguaagugacguacccagagacuuagaaguuguagcagccaccccaacaucauuacuuauuucuugggaugcucccgcaguuacagucagguauuaucgaauaaccuacggagaaacaggcggaaauuccccaguucaagaauuuacaguuccaggcucaaaaucaacagcaacaauaagcggacugaaaccaggcgucgauuauacaaucacaguuuaugcaguaaccggaagaggagauucacccgcaucaucgaaaccaauaagcauaaacuauagaacugaaauagauaaaccuagucaaaugcaaguuacugacguucaagauaacucaauauccguaaaaugguuaccgucaucuucacccguaacaggauaccgcguaaccacaacacccaaaaacgguccaggaccuaccaaaacaaaaacagccggaccugaucaaacagaaaugacaauagaaggacuacaacccaccguugaauacgucguaucaguuuacgcacaaaaccccaguggagaaucacaaccauuaguucaaacggcuguaacaacaauacccgcaccaacagaccuaaaauucacccaaguaacuccaaccucucuaucugcacaauggacaccaccaaacguacaauuaacaggguacagaguaagaguuacgcccaaagagaaaacuggaccaaugaaagaaauaaaccuagcgccugauucaucuucuguuguaguaucuggucuuaugguugcuacaaaauaugaaguaucaguuuacgcguuaaaagacacacucacaucaagaccagcacaagguguugucacaaccuuagaaaacguaagcccacccagacgugcaagaguuacugacgcaacugaaacaacaauaacaauuuccuggagaaccaaaaccgaaacaaucacaggcuuucaaguugaugcggugccagccaacggccaaacaccuauucaacgaacaauuaaacccgacgucagaucuuacacuauaacaggauuacaaccaggaacagauuauaaaauauaucuauauacacuaaacgauaaugcaagaucaucaccaguugucauagacgcuucaacggccauugaugcaccaucaaaucuucgcuucuuagcaacaacaccaaacaguuuauuaguaagcuggcaaccgccucgcgcuaggauaacugguuacauaaucaaauacgaaaaaccugguaguccaccaagagaaguaguaccucgaccgagaccagguguaacagaagcuacaaucacaggauuagaaccaggaacagaauauacaauuuaugucauagcauugaaaaauaaucaaaaauccgaaccauuaauaggcagaaagaaaaccgaugaauuaccacagcuaguaacacuaccccauccaaacuuacauggccccgaaauuuuagauguacccucaacaguacagaaaacacccuucguaacacauccugguuacgauaccggaaauggaauccaauugcccggaacuagcggacaacaacccaguguaggucaacaaaugaucuucgaagaacacggauuuaggagaacaaccccucccacaacagcaacccccauuagacaccgucccagacccuauccuccaaacgucggugaagaaauacaaauuggacacauaccaagagaagauguugauuaucacuuauacccacauggcccugguuuaaacccaaaugcaucaaccgggcaagaagcucuaucacaaacaacaauaagcugggcgccauuucaagauacaucagaauacauaauaucaugccacccaguaggaacggaugaagaaccacuacaauuuagagucccuggaaccucuacaucagcaacuuuaacaggucuuacuagaggggccacguauaauaucauaguugaagcacuaaaagaucaacaaaggcacaaaguacgugaagaaguaguaacaguaggaaauaguguaaaugaaggauuaaaccaaccuacagaugacucuuguuuugacccauacacaguuagucauuaugcaguuggugacgaaugggaacgaaugucugaguccggauuuaaacuauuaugccaaugcuuaggauucggaagcggacauuuccgaugcgauucuucgagauggugucaugacaauggagucaauuacaaaauaggagaaaaaugggacagacaaggcgagaauggacaaaugaugucaugcacuugccuaggaaauggaaaaggagaguucaaaugcgacccacaugaagcaacuuguuacgacgacggaaaaacuuaucacguaggagaacaauggcaaaaagaauauuuaggagcaauaugcaguuguacgugcuucggaggacaacgagguuggcgaugcgauaauuguagaagaccaggaggagaaccaucuccugaagggaccacuggucaaucuuauaaucaauauucacaaagauaccaucaacguacaaacacaaacguaaauugcccaaucgaauguuuuaugccacuagauguccaagcagaccgagaagacucaagagaauaa

SEQ ID NO: 3714 - RNA, 2685 nt, Artificial Sequence
  BAG62178 variant
augcguguaacuugggccccaccacccaguauagaucuaacuaacuuuuuaguaagauauucaccagucaaaaaugaagaagacguagccgaacuaucaauuucacccucagauaacgcuguaguacuaacaaaucuucucccagguacagaauaugucguaucagucucaucaguauaugaacaacaugaaucaacuccgcuacgaggaagacaaaagacagguuuagacucaccaacugguauagauuuuagugacauaacagcaaacuccuuuacaguucauuggauugcaccaagagcaacaauaacuggcuacagaauaagacaucacccugaacacuuuaguggaagaccaagagaagauagaguaccacauucaagaaauaguauaacucuuaccaaucuaacucccggaaccgaauacguaguuagcauaguagcccuaaacggacgagaagaaucuccauuacuaauaggucaacaaucuacuguuucagacguaccacgagauuuagaagucguagcugccacaccaacaucauuacuaaucuccugggaugcaccagcaguuacaguaagauacuacagaauaacauacggagaaacaggagguaauaguccuguacaagaguucacaguaccagguucuaaaucaacagcaacaauuuccggacuaaaaccaggagucgacuauaccauaacaguauaugcaguaacagguagaggcgauucaccagcgucauccaaaccuauuuccauaaauuacagaaccgaaaucgauaaacccucucaaaugcaaguuacagauguucaagacaauuccauuucaguuaaaugguuaccuucuaguucgccagucacaggauauagaguuacaacaacuccuaaaaauggaccaggaccaacaaaaaccaaaacugcuggaccagaccaaacagaaaugacgauagaagguuuacacccaaccguagaauaugucguaucagucuaugcccaaaauccuucuggagaaucccaaccucuaguacaaacagcuguaacaacaauuccggcaccaacggacuuaaaauuuacacaaguaacccccacaucacuuagugcucaauggacuccaccaaauguacaacuaacgggauauagaguuagggucacacccaaagagaaaaccggacccaugaaagaaauuaaucuagcgccagacucaagcaguguaguuguauccggccuaaugguagcaacaaaauaugaaguaaguguuuaugcacuuaaagacacccuuacaucacgcccagcacaaggggugguuaccacauuagaaaaugucucucccccacguagagcuagaguaacagaugcuacagaaacuacuaucacuauaucuuggagaaccaaaaccgaaacaaucacaggauuccaaguagaugccguaccugcgaauggacaaacaccaauacaaagaacuauaaaaccagaugugagaucauacacaauaacgggauuacaacccggcaccgauuauaaaauauauuuguacacucuaaaugauaaugcucgauccucuccaguaguaauagaugcauccaccgcaaucgaugcuccaucaaaccuaagauucuuagcaacaacgccuaacucacucuuaguuaguuggcaaccaccaagagcucgaauaaccggauauauuauaaaguaugaaaaaccugguuccccaccgagagaaguagucccaagaccacgcccgggcguaacugaagcaaccauaacuggauuggaaccagguacugaauacacaaucuacgucauugcucucaaaaauaaccaaaaaucagaaccucuaauuggacgaaagaaaacaggacaagaagccuuaucacaaacaacaauaagcugggcuccuuuccaagauacaagugaauacauaaucuccugccauccaguaggaacugaugaagaaccguuacaauuccggguaccagguaccuccacaagugcaacucugacaggucugacgagaggggccacuuacaauauaauaguugaagcauuaaaagaucaacaaagacauaaaguaagagaagaagucauaacgguagguaauucuguuaaugaaggguuaaaucaacccaccgaugauucauguuuugauccauauacuguuucacacuaugcaguaggagaugaaugggaaagaaugucagaaucaggauuuaaauuauuaugccaaugccuaggauuuggaucaggacacuucagaugugacuccucaagauggugccaugacaauggaguaaacuauaaaauaggcgaaaaaugggauagacaaggagaaaauggccaaaugaugucaugcacaugcuuaggaaauggaaaaggagaauuuaaaugcgacccccaugaagcaacaugcuaugaugauggaaaaacauaucacguaggagaacaauggcaaaaagaauaccuuggagccauaugcucauguaccugcuucggaggucaaaggggauggcgaugcgauaauuguagaagaccaggaggugaaccaucccccgaaggaacaacaggucaaucauauaaucaauacucccaaagauaucaccaaagaacuaauaccaauguaaacugcccuauagaauguuucaugccuuuagacguucaagcagauagagaagauagucgcgaguaa

SEQ ID NO: 3715 - RNA, 1152 nt, Artificial Sequence
  BAH12351 variant
auggcaucagcauucagacuaucacuaaaaccaaaaguaucagacaacaugacacaccuaaugguagacuuuucacaagaaagacaaaugcuacaaacacuaaaauuccuaccaguaccaaaagcaccagaaauagacccugucgaaugccuaguagcagacaacaguguaacaguugcauggagaaugcccgaagaagauaauaaaauagaccacuucauacuagaacacagaaaaacaaauuuugacggucuaccaagaguaaaagacgaaagauguugggaaauaauagauaauauaaaaggaacugaauacaccuuaagcggacuaaaauucgacucaaaauauaugaauuuuagaguaagagcaugcaacaaagcaguagcaggagaauacagcgauccaguaacauuagaaacaaaagcauuaaacuucaaccuagacaacucaucaagccaccuaaacuuaaaaguagaagacaccugcguagaaugggacccaacaggaggaaaaggacaagaaucaaaaauuaaaggaaaagaaaacaaaggaucaguacacguaacaagccuaaaaaaacacaccucaggaacaccauccccaaaaagaacauccguaggaagccgaccuccugcaguaagaggaucaagagacagauucacaggagaaaguuauacaguacuaggcgacacagcaauagaaagugggcaacauuauugggaaguaaaagcccaaaaagacugcaaaagcuauucaguagguguugcauacaaaacacuuggaaaauuugaccaacuaggaaaaacaaauacaaguugguguauacacgucaacaacugguuacaaaacaccuucgcagcaaaacacaauaacaaaguaaaagcauuagauguaacagucccagaaaaaauaggaguauucugcgauuucgacggaggacaacugucauuuuaugacgcaaacaguaaacaauuacuauauuccuucaaaacaaaauucacacaaccaguauuaccaggauucaugguaugguguggaggccuaucacuaucaacaggaaugcaaguaccaucagcaguaagaacacuacaaaaaucagaaaacggaaugacaggaucagccaguucauuaaacaauguaguaacccaauaa

SEQ ID NO: 3716 - RNA, 441 nt, Artificial Sequence
  BAH14175 variant
augccaccaucaaaaccacacccaccaguaguaggaaaaguaacacaccacucaauagaacuauacugggaccuagaaaaaaaagcaaaaagacaaggaccacaagaacaaugguucagauucucaauagaagaagaagacccaaaaaugcacacauacggaauaauauacacaggauacgcaacaaaacacguaguagaaggacuagaaccaagaacacuauacagauuuagacuaaaaguaacaucaccaucaggagaaugcgaauacucaccacuaguaucagucucaacaacaucagaauacucagaccgaccacacagcccacuaucaagaucaauggaaaugacaucaaaccuagaaaaaauauucugccuaucauucggacuaacaagaucaagaaacgacacaauauucaaacacugcaacaacauaugcuaa

SEQ ID NO: 3717 - RNA, 2055 nt, Artificial Sequence
  EAX08810 variant
auggcagaacauccaccacuccuagauacgacgcagauauuaaguagcgacauaucacuauuaucagcuccaauaguaagcgcagacggaacacaacaagucauccuaguacaaguuaauccuggagaagcauucacuauaagaagagaggacggucaauuucaauguauaaccggaccggcccaaguaccaaugaugucaccaaauggaucagucccaccaauauacguaccaccaggcuaugcuccacaaguaauagaagacaacggcguaagaaggguuguaguaguaccucaggcaccagaauuucacccagguucacauaccguuuuacaucguaguccacaucccccauuaccaggguuuauuccagucccaacaaugaugccaccaccaccaagacauauguauagcccaguaacaggagcaggagacaugacuacgcaauauaugccacaauaucaaucaagccaaguauauggugauguagacgcgcacaguacucacggucgaucaaacuuuagagacgaaagaucaucaaaaacauaugaacgacuacaaaagaaacuuaaagauaggcaaggaacccaaaaagacaaaaugucaucuccuccaaguucaccacaaaaaugcccuuccccaaucaaugaacacaauggauuaauaaaagggcaaauagccgguggaauaaacacaggaagcgcaaaaaucaaaucaggaaaagguaaaggaggcacacaagucgacacagaaauagaagaaaaagaugaagaaaccaaggccuucgaagcacugcucagcaauauaguaaaaccaguagcaucagauauacaagccagaacaguaguacugaccuggagcccaccuaguucucuaauaaauggggaaacagaugaaucaagcguuccugaauuauauggauaugaaguacuaauaucaucaacgggaaaagaugguaaauauaaaucugucuauguaggagaagaaacaaauauuacacuaaaugaccuaaaaccagcuauggauuaucacgcaaaaguacaagcagaauauaacaguauaaaaggaacaccaucagaagcagaaauauucacaacauuaucuugugaacccgacauaccuaaucccccuagaaucgcaaaccgaacuaaaaauagccuaacucuucaauggaaagcaccuuccgauaauggaucaaaaauccaaaacuucguacuagaaugggaugaaggaaaaggaaauggagaauuuugccaaugcuacaugggaagccaaaaacaauuuaaaauaacaaaacuaucuccagccaugggaugcaaauuuagauuaagcgcacgaaaugauuacgguacgucaggauuuagugaagaaguauuauacuauacaucagguugcgcaccaaguaugccugcuuccccagucuugacuaaggcuggaauaacauggcuaucacuccaauggucuaaaccuucaggaacaccaucagacgaaggcauaagcuacauauuggaaauggaagaagaaacaucaggauauggcuuuaagcccaaauaugacggagaagaucuugcauacacagugaaaaaccuaagacgaucaacaaaauacaaauuuaaaguaauagcauauaauagcgaaggcaaaagcaaucccagugaaguaguagaauuuacuacauguccagacaaaccagggauacccguaaaaccaaguguaaaaggaaaaauacauucacacucauuuaaaauuaccugggauccaccuaaagacaaugguggagcaacaauaaauaaauacguuguagagauggcagaaggaagcaaugggaauaaaugggaaaugauauauuccggagcaacaagagagcaccuaugcgauagauuaaacccuggauguuuuuaucgauuacgaguauacugcauaucagacggaggacaaagcgcaguuuccgaaucucuauuaguacaaacuccagcaguaccacccggaccaugcuuaccaccaagauuacaagguaggccaaaagcaaaagagauccaaacacccagcggcuaa

SEQ ID NO: 3718 - RNA, 492 nt, Artificial Sequence
  AAG35520 variant
augagugaaaguggauuuaaauuauuaugucaauguuuaggauuuggaaguggacauuucagaugugauucaagcagauggugucaugacaauggaguaaauuauaaaauaggagaaaaaugggauagacaaggagaaaauggacaaaugaugaguuguacauguuuaggaaauggaaaaggagaauuuaaaugugauccacaugaagcaacauguuaugaugauggaaaaacauaucauguaggagaacaauggcaaaaagaauauuuaggagcaauauguaguuguacauguuuuggaggacaaaggggauggagaugugauaauuguagaagaccaggaggagaaccaagcccagaaggaacaacaggacaaaguuauaaucaauauagucaaagauaucaucaaagaacaaauacaaauguaaauuguccaauagaauguuuuaugccauuagauguacaagcagauagagaagauaguagagaauaa

SEQ ID NO: 3719 - RNA, 1143 nt, Artificial Sequence
  AAA52471 variant
augauguucucaggauuuaaugcagacuacgaagcaucuucaucuagauguucaucagcuaguccagcaggagacucacucucauauuaucacucacccgcagacucauucucaagcaugggaucaccaguaaacgcacaagauuucugcacagaucuagcaguauccucagcaaacuucauaccaacaguaacagcaauaucaacaucuccagauuuacaauggcuaguacaaccagcauuaguaaguucaguagcaccaucacaaacaagagcaccccauccauuuggcguaccagcaccaucagcuggagcauauucacgcgccggaguaguaaaaacaaugacaggcggucgagcacaaucuauaggaagaagaggaaaagucgaacaauuaucaccugaagaagaagaaaaacgaagaaucagaagagaaagaaauaaaauggcagcagcaaaaugcagaaauagaagaagagaacuaacagacacgcuacaagcagaaacagaucaauuagaagaugaaaaaucagcauuacaaacagaaauagcaaauuuacuaaaagaaaaagaaaaacuagaauuuauauuagcggcacaucgaccagcuuguaaaauaccagaugauuuaggauuccccgaagaaaugucaguagccucacuugaccuaacaggaggauuaccagaaguagcaacaccagaaucagaagaagcauucacauuaccacuacuaaacgaucccgaaccuaaaccaucagucgaaccaguaaaaucaauaucuucaauggaacuaaaaacagaaccauucgaugacuuucuauuuccagcaucauccagaccuucaggaagugaaaccgcaagaucagucccagacauggaccuaaguggaaguuuuuacgcugccgauugggaacccuuacauucagguucucuaggaaugggaccaauggcaaccgaacuagaaccccucugcacaccaguaguaaccuguacaccaucaugcacagcuuauacaaguucauuuguuuuuacauacccagaagcagacucauucccuucaugugccgcagcccaccgaaaaggcucaucaucaaacgaaccaucaucagauagcuuaaguucaccaaccuuacuagccuuauaa

SEQ ID NO: 3720 - RNA, 1296 nt, Artificial Sequence
  AAG53607 variant
augccaaacccacgaccuggaaaaccaucagcaccaucauuagcacuaggaccaucaccaggagcuagcccaucauggcgagcagccccuaaagcaucagaccuccuaggagcaagaggaccaggaggcacauuucaagguagagaccuacgaggaggugcacacgcaucaucuucaucuuuaaauccaaugccaccuucacaacuacaauuaccuacauuaccucuaguaaugguagcuccaucuggagcuagauuaggcccauuaccacauuuacaagcauuacuucaagacagaccacauuucaugcaucaacuaucaacaguagaugcacaugcaagaacucccguccuccaaguucacccccuagaaucaccagccaugauaucauuaacaccaccaacuaccgcaacuggaguauuuucacuaaaagcccguccaggacucccucccgguaucaauguugcaagccuagaauggguaucucgugaaccagcccuauuauguacauucccaaacccaucagcacccagaaaagauucaacuuuaucugcaguaccacaaucaucauauccuuuauuagcaaauggagucugcaaauggccuggaugcgaaaaaguuuuugaagaaccagaagacuuucuaaaacauugucaagcagaccauuuauuagacgaaaaagguagagcacaaugucuacuucaaagagaaaugguacaaucacuagaacaacaauuaguacuagaaaaagaaaaauuaucagccaugcaagcacacuuagcaggaaaaauggcauuaacaaaagcaucaucuguagcaucaucagacaaaggaucauguuguauaguagcagcagguucucaaggaccaguaguaccagcauggucuggaccaagagaagcaccugauucacuauuugcaguucgaagacauuuauggggaucacauggaaauucuacuuuuccugaauuucuacauaacauggacuacuuuaaauuccacaacaugagaccaccauucacauacgcaacacuuauucgaugggcuauucuagaagcaccagaaaaacaaagaacauuaaaugaaauauaucacugguuuacacgaauguuugcuuucuuuagaaaccauccagcaacauggaaaaaugcaauaagacacaaucuaucucuacauaaauguuucguucgaguugaaucugaaaaaggagccguauggacaguagacgaauuagaauuucgaaagaaacguucacaaagaccaucaagauguucaaauccuacaccuggaccuuaa

SEQ ID NO: 3721 - RNA, 1098 nt, Artificial Sequence
  AAA52639 variant
auguggcuaagaucucaucgacaauuauguuuagcauuucuauuaguauguguacuaagcguaauuuucuuucuacacauucaucaagacucauuuccucauggauuaggauuaucaauauuauguccugauagacgauuaguaacacccccaguugcaauauuuuguuuaccuggaacagcuaugggaccaaaugcaucaucaucauguccacaacauccagcaucuuuaucaggaacauggacaguauauccuaauggacgauuuggaaaucaaaugggacaauacgcaacuuuacuagcacuagcucaauuaaauggaaggagagccuuuauuuuaccagcaaugcaugccgcauuagcuccuguauuucgaauaacauuaccuguuuuagcaccagaaguagauucaagaacaccauggagagaacuacaauuacacgauuggaugucagaagaauaugcagacuuaagagauccauuucuaaaauuaaguggauuuccauguucauggacauucuuucaucaucuaagagaacaaauaagaagagaauuuacauuacaugaucacuuaagagaagaagcacaaucuguuuuaggacaacuacgauuaggaagaacaggagacagaccuagaacauuuguuggaguacacguucgaagaggagauuauuuacaaguaaugccccaaagauggaaaggcguaguuggagauucagcuuauuuaagacaagcuauggauugguuuagagccagacaugaagcaccaguauuuguaguaaccagcaauggaauggaauggugcaaagaaaauauugauacaucccaaggagauguaacauucgcaggagauggacaagaagcuacaccauggaaagauuuugcacuauuaacacaauguaaucauacaauaaugacaauagguacauuuggauucugggcagcauauuuagcaggaggagauacaguauauuuagcaaacuuuacauuaccagauucagaauuucuaaaaauauuuaaaccugaagccgcauuucuaccagaauggguuggaauuaaugcagaucuaucaccuuuauggacacuagcaaaaccauaa

SEQ ID NO: 3722 - RNA, 1380 nt, Artificial Sequence
  EAW58359 variant
auggcuccucuauguccaucacccugguuaccccuacuaauaccugccccagcaccaggacuaacaguacaauuauuauuaucacuauuacuuuuaguaccaguucauccucaaagauuaccuagaaugcaagaagauagucccuuaggaggagguucaaguggcgaagacgaccccuuaggagaagaagaucuaccaucagaagaagauaguccaagggaagaagauccaccaggcgaagaagauuuaccaggagaagaggacuuaccaggagaagaagaucuacccgaaguaaaaccaaaaucagaagaagaaggaucacuaaaauuagaagacuuacccacagucgaagcaccaggcgauccacaagaaccccaaaacaaugcacauagagauaaagaaggugaugaucaaagccauuggagauacggaggagaucccccuuggccaagaguaagcccagcaugugcuggacgauuucaaucaccaguagauauacgcccccaauuagcagcauucuguccagcauugagaccauuggaauuauuaggauuccaauuaccaccacuaccagaauuaagauuaagaaacaauggacauaguguacaauuaacucuuccgccgggauuagaaauggcuuuagggccaggaagagaauauagagcuuuacaauuacacuuacauuggggagcagcuggaagaccaggaucugaacauacaguagaaggacaccgauuuccugcagaaauacacguaguacaccuaaguacagcuuuugcaagaguagacgaagcacuagguagaccaggaggauuagcaguauuagcagcauuucuugaagaagguccagaagaaaacucagcauacgaacaauuauuaucuagauuagaagaaauagcagaagaaggaucugaaacccaaguacccggacuagauauaagugcucuauuaccuucagauuuuucaagauauuuucaauaugaaggaucauuaacaacaccacccugugcacaagguguaauauggacaguauuuaaucaaacaguaauguuaucugcaaaacaacuucacacauuaagugacacauuauggggaccaggagacucaagguuacaauuaaauuuuagagcaacacaaccauuaaauggacgaguuauagaagcuagcuuuccagcaggaguagauaguucaccaagagcggcagaaccaguacaacugaacaguugccuagcagccggagauauauuagcuuuagucuuuggucuauuauucgcaguaacauccguugcauuccuaguacaaaugcgacgacaacacagacgaggcacuaaaggaggaguuucauacagaccagcagaaguugcugagacaggagcuuaa

SEQ ID NO: 3723 - RNA, 417 nt, Artificial Sequence
  U19142.1 variant
augagcuggagaggaagaucaacauauagaccaagaccaagaagauacguagaaccaccagaaaugauaggaccaaugagaccagaacaauuuagugaugaaguagaaccagcaacaccagaagaaggagaaccagcaacacaaagacaagauccagcagcagcacaagaaggagaagacgaaggagcaagcgcaggacaaggaccaaaaccagaagcagacucacaagaacaaggacacccacaaacaggaugugaaugugaagauggaccagacggacaagaaauggauccaccaaauccagaagaaguaaaaacaccagaagaagaaaugagaucacacuauguagcacaaacaggaauauuaugguuauuaaugaauaacuguuuucuaaacuuaagcccaagaaaaccauaa

SEQ ID NO: 3724 - RNA, 351 nt, Artificial Sequence
  AAH69397 variant
augagcuggagaggaagaucaacauauagaccaagaccaagaagauacguagaaccaccagaaaugauaggaccaaugagaccagaacaauuuagcgaugaaguagaaccggcaacaccagaagaaggagaaccagcaacacaaagacaagauccagcagcagcacaagaaggacaagacgaaggagcaagcgcaggacaaggaccaaaaccagaagcacacucacaagaacaaggacacccacaaacaggaugugaaugugaagauggaccagacggacaagaaauggauccaccaaacccagaagaaguaaaaacaccagaagaaggagaaaaacaaagccaaugcuaa

SEQ ID NO: 3725 - RNA, 357 nt, Artificial Sequence
  AAA82746 variant
augaauuuaagcagaggaaaaaguacauauuauuggccaagaccaagaagauauguacaaccaccagaaguaauaggaccaaugagaccagaacaauuuagugaugaaguagaaccagcaacaccagaagaaggagaaccagcaacacaaaggcaagauccagcagcagcacaagaaggagaagaugaaggagcaagugcaggacaaggaccaaaaccagaagcagauucacaagaacaaggacauccacaaacaggaugugaaugugaagacggaccagacggacaagaaauggauccaccaaauccagaagaaguaaaaacaccagaagaaggagaaaaacaaagucaauguuaa

SEQ ID NO: 3726 - RNA, 354 nt, Artificial Sequence
  AAH69470 variant
augucauggagaggaagaaguacauauuauuggccaagaccaagaagauauguacaaccaccagaaaugauaggaccaaugagaccagaacaauuuagugaugaaguagaaccagcaacaccagaagaaggagaaccagcaacacaaagacaagauccagcagcagcacaagaaggagaagaugaaggagcgagugcaggacaaggaccaaaaccagaagcagauagucaagaacaaggacauccacaaacaggaugugaaugugaagauggaccagauggacaagaaauggauccaccaaauccagaagaaguaaaaacaccagaagaaggagaaggacaaagucaauguuaa

SEQ ID NO: 3727 - RNA, 354 nt, Artificial Sequence
  AAA82748 variant
augucauggagaggaagaaguacauauuauuggccaagaccaagaagauauguacaaccaccagaaguaauaggaccaaugagaccagaacaauuuagugaugaaguagaaccagcaacaccagaagaaggagaaccagcaacacaaagacaagauccagcagcagcacaagaaggagaagaugaaggagcaagugcaggacaaggaccaaaaccagaagcagauucacaagaacaaggacauccacaaacaggaugugaaugugaagacggaccagauggacaagaaauggacccaccaaauccagaagaaguaaaaacaccagaagaaggagaaaaacaaagucaauguuaa

SEQ ID NO: 3728 - RNA, 354 nt, Artificial Sequence
  AAA82749 variant
augucauggagaggaagaaguacauauuauuggccaagaccaagaagauauguacaaccaccagaaguaauaggaccaaugagaccagaacaauuuagugaugaaguagaaccagcaacaccagaagaaggagaaccagcaacacaaagacaagauccagcagcagcacaagaaggagaagaugaaggagcaagugcaggacaaggaccaaaaccagaagcagauucacaagaacaaggacauccacaaacaggaugugaaugugaagacggaccagauggacaagaaguagacccaccaaauccagaagaaguaaaaacaccagaagaaggagaaaaacaaagucaauguuaa

SEQ ID NO: 3729 - RNA, 354 nt, Artificial Sequence
  AAC25989 variant
augucauggagaggaagaagcacauauuauuggccaagaccaagaagauauguacaaccaccagaaaugauaggaccaaugagaccagaacaauuuagugaugaaguagaaccagcaacaccagaagaaggagaaccagcaacacaaagacaagauccagcagcagcacaagaaggagaagaugaaggagcaagugcaggacaaggaccaaaaccagaagcacauucacaagaacaaggacauccacaaacaggaugugaaugugaagacggaccagauggacaagaaauggauccaccaaauccagaagaaguaaaaacaccagaagaaggagaaaaacaaagucaauguuaa

SEQ ID NO: 3730 - RNA, 351 nt, Artificial Sequence
  AAC33676 variant
augagcuggagaggaagaucaacauauagaccaagaccaagaagauacguagaaccaccagaaaugauaggaccaaugagaccagaacaauuuagugaugaaguagaaccagcaacaccagaagaaggagaaccagcaacacaaagacaagauccagcagcagcacaagaaggagaagacgaaggagcaagugcaggacaaggaccaaaaccagaagcagacucacaagaacaaggacacccacaaacaggaugugaaugugaagauggaccagacggacaagaaauggauccaccaaauccagaagaaguaaaaacaccagaagaaggagaaaaacaaagccaaugcuaa

SEQ ID NO: 3731 - RNA, 1344 nt, Artificial Sequence
  AAA35657 variant
auggaauuauuaaaauuaaacagaucaguacaagguacaggaccagguccaggagcaucacucuguagaccaggagcaccacuucuaaacucaucauccguaggaaauuuaucaugugaaccaccacgaauucgaggagcuggcacaagagaauuagaauuagcuauaagaauuacuuuauaugcuguuauuuucuuaaugucaguaggaggcaauaugcuaauaauaguaguacuaggacuaagcaggagacuccgaacaguuacuaaugcuuuuuuauuaucauuagcaguaucagaccuauuacuagcaguugcauguaugccauucacauuacuuccaaaccuaaugggaacauuuauauuuggaacaguaaucuguaaagcaguuucuuauuuaaugggcguuucuguaucaguaucgacauuaucacuaguagcgauagcauuagaacgauauagugcaauaugucgaccauuacaagcucgaguauggcaaacuagaucacacgcagccagaguaauuguagcuacaugguuauuaucaggauuacucaugguuccuuaucccguauacacaguaguacaaccuguaggaccuagaguuuuacaauguguacacagauggccaucagcaaggguucgacaaacauggucaguacuacuauuacuauuauuauucuucauaccaggaguaguaauggcugucgcauauggacuaauaucaagggaauuauauuuaggauuaagauucgauggagacucugauucagauagucaaaguagaguaagaaaucaaggaggacuaccuggagcaguacaucaaaauggacgaugccguccugagacaggagcaguuggagaagauucugauggcuguuauguacaauuaccuagauccagaccagcauuagaacuaacagcauuaacugcaccagguccaggaucugguagcagaccaacucaagcaaaacuauuagcaaaaaaaagaguaguacgaaugcuucuaguaauagugguauuauuuuuuuuauguuggcuaccagucuauucugcaaauacuuggagagcauuugauggcccaggagcccauagagcuuuaucaggagcaccaauaucauuuauucaccuacuaucauaugcuagcgcaugcguaaauccacuaguuuauuguuuuaugcauagaagauuuagacaagcauguuuagaaaccugcgcaagauguugcccuagaccaccuagagcaagaccacgagcacuaccagaugaagauccuccuacuccuucaauagcauccuuaaguagacuuucauauacuacaauaaguacucuuggaccuggauaa

SEQ ID NO: 3732 - RNA, 2226 nt, Artificial Sequence
  AAD22449 variant
auggcauuguuuacaccauggaaacucucaucacaaaaacuugguuuuuuucuaguuacauucggauuuauauggggaaugauguuauuacauuucacuauucaacaaagaacgcaaccagaaucaagcucaauguuacgcgaacaaaucuuagacuuaucaaaaagauauaucaaagcauuagcagaagaaaaucggaauguuguagauggaccuuacgccggugucaugaccgccuaugacuugaaaaaaacgcucgcaguauuauuagauaauauacuucagagaauaggcaaacuagagucaaagguagacaaucuuguaguaaauggaacugggacaaauagcacaaacuccaccacagcaguuccaucacucguagcacuugaaaaaauaaauguagcagacauaauaaacggagcacaagagaaaugcguauuaccacccauggacggauauccacacugugaaggaaaaauaaaauggaugaaagacauguggagaucugacccaugcuaugccgauuauggugucgacggaucaacuuguucauuuuucauauaucuaucugaagucgaaaauuggugcccacaccuucccuggagagcuaaaaacccauaugaggaagccgaucacaauagccucgcagaaauaagaacagauuucaauaucuuauacagcaugaugaagaagcacgaagaauucagauggaugagacugcgaauaagaagaauggcagaugcauggauacaagcaauaaaaaguuuagcagaaaaacaaaaucuagaaaaaagaaaacgaaaaaaaguccuagugcaccuaggauuauuaacaaaagaaucuggauuuaaaauagcagaaaccgcauucucaggcggucccuuaggagaacuugugcaauggagcgaccuaauaacaucacuuuaucuacuuggacacgacauaagaauaucagcaagccuagcugagcucaaagaaauaaugaagaaaguagucggaaaucgaucagguugcccaacaguuggcgacagaauaguagaauuaauuuacaucgacauaguaggauuagcacaauucaaaaaaacccuugggccaagcuggguacauuaucaauguaugcuucgcguauuagacucuuuugguacagaaccagaauuuaaucacgcaaacuaugcccagagcaaaggacacaaaacaccuuggggaaaauggaauuuaaauccacaacaauuuuacacuauguuuccacacacuccugauaauucauuucucgguuucguaguagaacaacaccuuaacucaucagacauacaccacauaaacgaaauaaaaagacaaaaccaaucauuaguauacggaaaaguagacucauuuuggaaaaacaaaaaaauauaccuugauaucauccauacauauauggaaguacaugcaacuguuuauggaucaucaacaaaaaacauaccaagcuauguaaaaaaccacggaauacuaucaggucgggauuuacaauuccuacucagagaaacaaaacuauucgugggauuaggcuucccauaugaaggaccagccccacuugaagcaaucgcaaacggaugugccuucuuaaauccaaaauucaauccaccaaaaucaagcaaaaauacugacuucuucauuggaaaaccaacacuucgcgaauuaacaucacaacacccauaugcugaaguuuucauaggacgaccacacguauggacaguagaccuaaacaaucaagaagaaguugaagaugcaguaaaagcaauuuuaaaucaaaaaauagaaccauacaugccauaugaauuuacuugcgaaggaaugcugcaaagaauaaacgcauucauugaaaaacaagacuucugucauggacaaguuauguggccaccauuaucagcacugcaaguaaaacuagcagagccaggacaaucaugcaaacagguaugccaagaaucccaauuaauaugcgaaccaucauuuuuucaacaucuaaacaaagauaaagacauguuaaaauauaaaguaacaugccaaagcucugaacucgcaaaagacauauuaguaccaaguuuugacccuaaaaauaaacauugcguauuucagggagaccuauuacuauuuucaugugcaggagcacauccaagacaucaacggguauguccuugcagagauuucauaaaaggacaaguagcacucuguaaagacugccuguag

SEQ ID NO: 3733 - RNA, 1743 nt, Artificial Sequence
  EAX11770 variant
auggcaggaacaguacgaacagcaugccuaguagucgcaaugcuucuaucuuuagacuucccaggacaagcacaaccaccacccccaccaccggacgcaacaugucaucaaguaagaucauuuuuccaacguuuacaaccaggucuuaaauggguuccagaaacaccaguaccaggcagcgaucuacaaguaugcuuaccaaaaggaccaacauguuguucaagaaaaauggaagaaaaauaucaacuuacagcacgcuuaaacauggaacaacuauuacaaucagcaagcauggaacuaaaauuuuuaauaauacaaaaugcugcaguuuuccaagaagcauucgaaauaguuguacgacaugcgaaaaacuacacuaacgcaauguucaaaaacaauuacccaucccuaacuccacaagcauucgaauuuguaggugaguucuucacagaugucuccuuauacauuuuaggaucagacauaaauguagaugauaugguaaaugaauuauuugacucacuauuuccaguaaucuacacacaacuaaugaaccccggacuaccagacucugcacuagauauaaaugaaugccuuagaggagcaagaagagaccuaaaaguauucggcaacuucccuaaacucauuaugacacaaguauccaaaucauuacaaguuacuagaauauuccuccaagcacuaaacuuaggaauagaaguaauaaauaccacugaccaccuaaaauucaguaaagacugcggaagaaugcuaacaagaaugugguacuguucuuacugucaaggccuaaugaugguaaaaccaugcgguggauacuguaacguugucaugcaagguugcauggcuggcguuguagaaauagauaaauauuggagagaauauauauuaucucuagaagaauuaguaaacggaauguaucgaauauacgacauggaaaauguucuauuaggucuuuucucaacaauacacgauuccauacaauauguucagaaaaacgcuggcaaacuaacaacaacaauaggaaaacuaugugcacauagucaacaaagacaauauagaucagcauacuacccagaagaucucuucauagauaagaaaguacuaaaaguagcacacguagaacacgaagaaacgcugucaucuaggcgccgagaacuaauacaaaaacuaaaaucauuuauaucuuuuuacucugcucucccaggauacauaugcucucacucccccguagccgaaaacgacacauuaugcuggaacggccaagaacuuguagaacgcuacucacaaaaagcagcuagaaaugguaugaaaaaucaauuuaaccuacaugaacuaaaaaugaaaggaccagaaccagucguaucucaaauaauagacaaacuaaaacauauaaaccaauuacuaagaacaaugucaaugcccaaaggacgaguuuuagacaaaaaucuagaugaagaaggauucgaaucaggcgacugcggagacgaugaagaugaauguauagguggaaguggagacggaaugauaaaaguuaaaaaccaacuaagauuccucgccgaacucgccuaugaucuagauguagaugaugcaccuggaaacucucaacaagcaacaccaaaagacaaugaaauuucaacauuccauaaucuuggcaauguucauuccccacucaaauuauugacaucaauggcaauuaguguaguuugcuuuuucuuucucguccacuaa

SEQ ID NO: 3734 - RNA, 1743 nt, Artificial Sequence
  AAA93471 variant
auggccggaaccguaagaacagcaugcuuaguaguagcaauguuacuaucucuagauuucccaggacaagcacaaccuccaccgccuccaccagaugcuacaugucaccaaguaagaucauucuuucaaagacuacaaccaggacuaaaauggguaccagaaacaccaguaccaggcagcgaccuacaaguaugcuuaccaaaaggaccaacaugcuguagcagaaaaauggaagaaaaauaccaacuaacagcaagacucaauauggaacaauuauuacaauccgccucaauggaauuaaaauucuuaauaauucaaaacgcagcagucuuccaagaagcauucgaaauaguaguaagacaugcuaaaaacuacacaaaugcaauguuuaaaaauaauuauccaagucuaacaccccaagcauuugaauuuguaggugaauuuuucacagacguaagccuauauauacuuggcucagauauaaacgucgacgacaugguuaaugaauuauuugacucccuauucccaguaauauauacacaacuaaugaacccaggccuaccagacuccgcacuagauauaaacgaaugccuaagaggagccagaagagauuuaaaaguauuuggcaacuuucccaaacuaauaaugacucaagugucuaaaucacuacaaguaaccagaaucuuucuacaagcauuaaaucuuggcauagaaguaauaaacaccaccgaccaccuaaaauuuuccaaagacuguggacgaaugcucacaagaaugugguacugcucuuacugucaaggauuaaugaugguaaaaccaugcggaggauauugcaacguagucaugcaagguuguauggcaggagucgucgaaauugauaaauauuggagagaauacauacuuucacuugaagaauuaguuaacggaauguacagaauauaugauauggaaaauguccuacuaggacuauuuucaacaauccacgauucaauacaauacguacagaaaaaugcaggaaaacuaacaacaaccaucggaaaacuaugcgcacauucacaacaaagacaauacagaucugcauacuaccccgaagaucuuuuuaucgauaagaaagucuuaaaaguagcacauguagaacacgaagaaacucuuucuucucgcagaagagaacucauccaaaaacuaaaaucauucauuucauuuuacagcgcacuccccggauacauauguagucacucuccagucgcagaaaaugacacauuaugcuggaacggacaagaacuugucgaacguuacucacaaaaagcagccagaaaugguaugaaaaaccaauuuaauuuacacgaacuaaaaaugaaagggccugaaccaguuguaucacaaauaauagacaaacuaaaacacauaaaccaacuauuaagaacuaugucaaugccaaaaggaagaguacuagacaaaaaucuugacgaagaaggauucgaauccggagauugcggagaugaugaagacgaauguauuggcggaucaggagacggaaugauaaaagucaaaaaccaauuacgcuuccuagcagaacuagcauacgauuuagacguagaugaugcacccggaaacagucaacaagcaacgcccaaagacaaugaaauaucaacuuuucauaaccuaggcaauguacauucaccauuaaaauuacucacaucuauggcaaucagcguaguauguuucuucuuccuaguacauuaa

SEQ ID NO: 3735 - RNA, 1743 nt, Artificial Sequence
  AAH35972 variant
auggcaggcaccguaagaacagcuugccuaguaguagcuauguuacuaucuuuagauuucccuggccaagcacaaccaccuccacccccaccagaugcaaccugccaucaaguaagaucauuuuuccaaagauuacaaccuggauuaaaauggguuccugaaacaccaguaccaggcucagaccuacaaguuugucuaccaaaagguccaacuuguugcucaagaaaaauggaagaaaaauaccaacuuacagccagauuaaauauggaacaacuacuucaaagugccucuauggaacuuaaauuuuuaauaauacaaaaugcagcaguuuuccaagaagcauucgaaauaguaguaagacaugccaaaaacuauacaaacgcaauguucaaaaauaauuauccaucauuaaccccccaagcguuugaauuugucggagaauucuuuacagaugucucauuauauauauuaggauccgacauaaauguagacgacaugguaaacgaacuauuugacuccuuauuccccguaauauauacacaacuaaugaacccaggauuaccagauucagcacuagacauaaacgaaugccuaagaggcgcaagaagagaccuaaaagucuucggaaacuuucccaaacuaauaaugacccaagucagcaaaucacuacaaguaaccagaauauuuuuacaagcauuaaaccuaggaauagaaguuauuaauacaacagaucauuuaaaauuuagcaaagauuguggacgaaugcuaacuagaaugugguauugcucauacugucaaggucuuaugaugguaaaaccuugcgguggauauugcaauguaguaaugcaaggcugcauggcaggaguaguagaaauagauaaauacuggcgagaauauauacuuagccuagaagaacuaguaaacggaauguaucgcauauacgacauggaaaaugucuuauugggauuauuuuccacaauacacgacagcauucaauacguccaaaaaaaugcaggaaaauuaaccacaaccauaggaaaauuaugcgcacacucacaacaaagacaauaucgauucgcauacuacccagaagauuuauucauagauaaaaagguauuaaaaguugcacauguagaacacgaagaaacucuaucaucaagaagaagagaacuaauacaaaaacucaaaagcuucaucucauuuuauagugcacuaccaggauacauauguagucacucaccaguagcagaaaacgacacuuuaugcuggaauggacaagaacugguugaaagauacucucaaaaagcagcacgaaacggaaugaaaaaucaauucaauuuacacgaacuaaaaaugaaaggaccagaaccaguagugucacaaaucauugacaaacuaaaacacauuaaucaacuacuacgcacaauguccaugccuaaaggcagaguacuagacaaaaauuuagacgaagaaggauuugaaaguggagauuguggagacgaugaagaugaauguauaggcggaucaggagauggaaugauaaaaguaaaaaaccaacuaagauuccuagccgaauuagcuuacgaccucgaugucgacgacgcaccuggaaauucacaacaagcaacaccaaaagacaaugaaauauccacauuccauaaccuaggaaacguacauucgccccuaaaacuacuaaccucaauggcaauaucagucgucugcuuuuuuuucuuaguacacuaa

SEQ ID NO: 3736 - RNA, 1683 nt, Artificial Sequence
  EAW93784 variant
auggaaugucuuuacuauuucuuaggcuuucuauuacuagcagcuagacuuccacuugacgcagcaaaaagauuucaugacguacuaggaaaugaaagacccucagcauauaugagagaacacaaucaauuaaauggauggucauccgaugaaaaugacuggaaugaaaaacuauauccaguauggaaacgaggagacaugagauggaaaaacucuuggaaaggcggacgaguucaagcagucuuaaccucagacucuccagcacuaguaggaucuaacauaaccuuugcaguaaacuuaauuuucccaagaugucaaaaagaagacgcuaauggaaauauaguauaugaaaaaaacuguaggaacgaagcaggacuaucagcugauccauacguuuauaacuggacugccuggucugaagauuccgacggagaaaauggaacaggucaaucacaccacaauguauucccugacggcaaacccuuuccccaucacccuggauggagacgauggaacuucauauauguauuucacacauuaggccaauauuuucaaaaacuagguagauguaguguaagaguaucaguaaacacagcuaauguaacauuagguccacaauuaauggaaguaacaguauacagaagacacgguagagcauauguacccauagcacaaguaaaagacguauaugucgucacagaucaaauaccaguauucguuacaauguuccaaaaaaaugacagaaauuccagcgaugaaacauuucuaaaagaucucccuauaauguucgauguccuaauucacgauccaucccacuucuuaaacuauucaacaauaaacuacaaauggucauucggugacaauacaggacuauuuguuucaacuaaccauacuguuaaccacacauacguauuaaacggaacauucuccuuaaaucucacagucaaagcagcagcccccgguccaugcccaccaccgccaccuccaccuagaccaucaaaaccaacacccucuuuagguccagcaggugauaauccccuagaacuuucaagaauucccgaugaaaauugccaaauaaauagauauggacauuuucaagcaacaauaacaauaguagaaggaauauuagaaguaaacaucauccaaaugacagauguuuuaaugccuguucccuggccagaauccagucuaauagauuucguaguaacaugccaaggaagcauuccuaccgaaguauguacaauuauaucagacccaacaugugaaauuacccaaaauacaguaugcucucccguagauguugacgaaaugugccucuuaaccguucgacgaacauucaacggaucaggaacuuauugcguaaaucuaacauuaggugaugacacuucacuugcauuaacaucaacauuaauuucaguaccagaccgugauccagcuucacccuuaagaauggccaauagugcacuuaucucaguaggaugccucgcuauauuuguaacaguaauaucacuccuagucuacaaaaaacauaaagaauacaacccaauagaaaacucaccugguaacguaguaagaucuaagggucuuucaguguuccucaauagagcaaaagcaguauucuucccaggcaaucaagaaaaagauccacuacuaaaaaaccaagaauuuaaaggaguaucauga

SEQ ID NO: 3737 - RNA, 1719 nt, Artificial Sequence
  AAH32783 variant
auggaaugccuauacuacuuucuaggcuuucuauuauuagcagcucgacuaccauuagaugcagcaaaacgauuccaugacguacuaggaaacgaacgcccauccgcuuacaugagagaacacaaucaauuaaacggauggucaagcgaugaaaaugacuggaacgaaaaacucuauccagucuggaaaagaggagacaugagauggaaaaauucauggaaaggcggccgaguacaagcagucuuaacaucagacucacccgcacuaguaggaucaaauauaacauucgcaguaaaucuaauuuuucccaggugucaaaaagaagaugccaacggaaauauuguauaugaaaaaaacugucgaaacgaagcaggauuaagugcugacccauacguauacaauuggacagcauggucugaagauuccgauggugaaaacgguacaggacaaagucaccauaaugucuuuccagauggaaaaccauuuccacaucacccaggcuggcgcagauggaauuucauauacguuuuucacacuuugggacaauauuuccaaaaacuuggccgaugcucuguaagagucagcguaaacacugcaaacgugacguuaggaccacaacuaauggaaguuaccguuuauagaagacauggaagagcauauguacccaucgcccaagucaaagauguauauguaguaacagaucaaauaccuguauuuguaacuauguuccaaaaaaacgauagaaacuccucagaugaaacauucuuaaaagauuuaccaauaauguucgacguacuaauacaugauccaagccacuucuuaaacuauaguacaauuaauuauaaauggucauuuggagacaauacuggacuguuugucucuaccaaccacacaguuaaucacacauacguauuaaacgguacauucucacucaacuuaacaguaaaagcagcagcaccaggaccuugccccccaccaccuccaccaccgagaccuucaaaaccgacaccaucacuagcaacaacucucaaaucauaugacucuaacacaccaggccccgcaggagauaacccacucgaacuaucucgaauaccagaugaaaauugccaaauaaauagauacggacauuuccaagcaacaauaacuauaguagaaggaauauuagaaguaaauauaauacaaaugacagacgucuuaaugcccguuccuuggccagaaaguucacuaaucgacuuugucguaaccugucaaggaaguaucccuacugaagucugcaccauaauuagugauccuacuugcgaaauaacacaaaauacuguaugcucaccaguagacgucgacgaaaugugucuauuaacaguaagaaggaccuuuaacggaucuggaaccuacugcgucaacuuaacauuaggagaugacacaucacuagcccuuaccucaacauuaauaucaguaccagauagagacccagcauccccacuaagaauggcuaauagcgcauuaauaucaguagggugucuagcaauauuuguaacaguaauauccuuacucguauacaaaaaacauaaagaauacaauccaauagaaaauuccccaggaaacguagugagaagcaaaggacuaucgguauuuuuaaaucgagccaaagcaguuuuuuuuccagguaaucaagaaaaagacccauuacuaaaaaaucaagaauuuaaaggcgucucauaa

SEQ ID NO: 3738 - RNA, 621 nt, Artificial Sequence
  CAD43718 variant
auggaaugccuauacuacuuccuaggauuccuacuacuagcagcaagacuuccacuagacgcagcaaaaagauuccacgacguacuaggaaacgaaagaccaagcgcauacaugagagaacacaaucaauuaaacggauggucaucagacgaaaacgacuggaacgaaaaacuauacccaguauggaaaagaggagacaugagauggaaaaacucauggaaagguggaagaguacaagcaguacuaacaucagacucaccagcacuaguaggaucaaacauaacauucgcaguaaaucuaauauucccaagaugccaaaaagaagacgcaaacggaaacauaguauaugaaaaaaacugccgaaacgaagcaggacuaucagcagacccauacguauacaacuggacagcauggagcgaagacucagacggagaaaacggaacaggccaaucacaccacaacguauucccagacggaaaacccuucccacaccacccaggauggagaagauggaacuucauauacguauuccacacacuagacuggcuauuacaaacaccaaaauuacuauuauaccuaucacuaaaauuccaaccaucacuauucuuacuauacaauuaa

SEQ ID NO: 3739 - RNA, 621 nt, Artificial Sequence
  AAH11595 variant
auggaaugccuauacuacuuucuaggauuccuauuacuagcagcaagacuaccauuagacgcagcaaaaagauuccacgacguacuaggaaacgaaagaccaucagcauauaugagagaacauaaccaauuaaacggauggucaucagacgaaaacgacuggaaugaaaaacuauacccaguauggaaaagaggagacaugagauggaaaaacucauggaaaggaggaagaguacaagcaguacuaacaucagacucaccagcacuaguaggaucaaacauaacauuugcaguaaaccuaauauucccaagaugccaaaaagaagacgcaaauggaaauauaguauacgaaaaaaauugcagaaacgaagcaggacuaucagcagacccauacguauacaacuggacagcauggucagaagacucagacggagaaaacggaacaggacaaucacaccacaacgucuuuccagacggaaaaccauucccacaccacccaggauggagaagauggaauuucauauauguauuccacacacuaggaugguuacuacaaacacccaaacuacuauuauacuuaagccuaaaauuccaaccaagucuauuuuuacuauauaacuaa

SEQ ID NO: 3740 - RNA, 2640 nt, Artificial Sequence
  CCDS5600.1 variant
augaaaaugcugacucgacuucaaguacucacucucgcacuuuucaguaaaggauuucucuuguccuuaggugaucauaauuuccuccgaagagaaaucaaaauagaaggagacuuaguauuagguggucuuuuuccuauuaacgaaaaagguacaggaaccgaagaauguggacgaauuaaugaagacaggggaauacaacgauuagaagcuauguuauuugcuauagaugaaauaaauaaagaugacuauuuacuaccagguguaaaacuaggaguucacauccucgacacaugcucuagagacacauaugcacuagaacaaucacuagaauuuguacgugcaucauuaacuaaaguugaugaagcugaauauauguguccugauggaucuuaugcaauacaagaaaauauacccuuacucauugcuggagucauugggggauccuacucaucaguaagcauccaagucgcuaaccuucuaagauuauuccaaaucccucaaauaucauacgccaguacaucagcuaaacuaucagauaaaagccgauacgacuauuuugcuagaacaguaccaccagauuucuaccaagcaaaagcaauggcugaaauacuaagauuuuucaauuggacuuauguuagcacaguugcuucagaaggugacuacggcgagacuggaauugaagcauuugaacaagaagcaagauugagaaauauauguauagcuacugcugaaaaaguagguagaucaaacauacgaaaauccuacgauucuguuauucgagaacuccuucaaaaaccaaacgcuagaguagucguacuuuucaugcgauccgacgauucuagagaacuaauugccgcugcaagcagagcuaaugcaucauuuaccugggucgcuagugacgguuggggcgcccaagaaucuauaauuaaaggaucagaacacguagccuacggagcaauaacccuugaauuagcaucccaaccaguuagacaauuugaucgcuacuuccaaucauuaaacccuuacaacaaucaucgaaacccaugguuucgagauuuuugggaacaaaaauuucaauguucauuacaaaauaaacgcaaucacagacgcguuugcgacaaacaccuggcaauagacucaucaaauuaugaacaagaauccaaaauaauguucguagucaaugccguauaugcuauggcacaugcacuccauaaaaugcaacgaacucuauguccaaacacaacaaaauuaugugacgcaaugaagauucuagauggcaagaaauuauacaaagauuaccugcuaaaaauuaauuucacagcacccuucaaucccaacaaagaugcugacucaauaguaaaauucgacaccuucggagauggaaugggaagauacaacguauuuaauuuucaaaacgucggcggcaaauacucuuaccuuaaaguaggacauugggcugaaacacuuucauuagacgucaauucaauacacuggucacgaaauucaguucccacgucacaauguucagacccaugugcaccaaaugaaaugaaaaacaugcaacccggagauguaugcuguuggauauguauaccuugugaaccuuacgaauacuuagcugaugaauuuacaugcauggauugcggauccggacaauggccaaccgcagaucucaccggaugcuacgauuuaccugaagacuacauaagaugggaagacgcuugggcaaucggaccaguuaccauugccugccuaggauuuauguguaccuguauggucguaacgguuuucauaaaacauaacaauacuccuuuaguaaaagcuagcggacgagagcuaugcuauauauuacuauuuggaguaggacuaucauauugcaugacauucuucuuuauagcgaaacccucacccguaauaugugcauuacgucgacuuggacuuggauccucauuugcaauauguuacucugcucuacuaacuaaaacaaacuguauugcaagaauauuugacggaguuaaaaauggagcacaaaggccuaaauuuauauccccauccucacaaguauucauuugccuaggacuaauacuuguucaaauuguuaugguaucaguaugguuaauacuagaggccccagguaccagaagguacacacuagcagagaaaagagaaacaguaauacuuaaauguaauguaaaagauucaucaaugcuaauauccuuaacuuaugaugugauuuuaguuauucuuugcacaguuuacgcguucaaaacaagaaaauguccagaaaauuuuaaugaagcaaaauuuauuggauuuaccauguauaccacauguauaaucuggcuagccuuucuacccauauuuuauguaacuucaucagauuaucgcguacaaaccacaaccaugugcauuucuguaucucuuucaggcuucguaguucuagguugccuauuugcacccaaaguucacauuauacuauuccaaccacaaaagaauguaguaacacauagacuccauuuaaauagauuuucaguuucaggaacaggaacgacauauagucaaucaagcgcaucaacuuaugucccaacaguauguaauggucgagaaguauuagacucaacaaccucaucccuuuaa

SEQ ID NO: 3741 - RNA, 1947 nt, Artificial Sequence
  CCDS4977.1 variant
augucgcaucacggaggcgcuccuaaagcaucaacguggguaguggcaucaagacgaucaucaacugugagcagagcaccagaacgacgaccagcugaagaacuaaacagaacuggacccgagggauacucaguaggucggggaggccgauggagaggaacgagcagaccaccagaagcggucgcagcaggacaugaagaauugccauuauguuuugcccuaaaaucacacuucguaggagcugugauaggaagaggaggcucuaaaauaaaaaauauacagagcacaacaaauacaacaauacaaauaauacaagaacaaccagaaaguuuaguaaaaauauucggaagcaaagcaaugcagacaaaagcaaaagcgguaauagacaauuuuguuaaaaaacuagaagaaaauuauaauagcgaaugcgggauugacacagcauuucaaccuucuguaggaaaagauggaucaacagacaacaauguuguagcaggagaccgaccuuugauagauugggaucaaauaagagaagaaggacugaaauggcaaaaaacaaaaugggcagaucugccuccaauaaaaaagaacuuuuauaaagaaaguaccgccacaagugcaaugagcaaaguagaagcagauaguuggaggaaagaaaacuuuaauauaacaugggaugauuuaaaagauggagaaaaaagaccaauaccaaacccaacgugcaccuucgaugaugcauuucaauguuacccagaaguaauggaaaauauaaaaaaagcagguuuccaaaaaccaacaccaauacaaagucaagcauggcccauaguauuacaagguauagaccuaauaggagucgcacaaacaggcacaggaaaaacauugugcuaucuaaugccaggauucauacacuuaguauuacaaccaucauuaaaaggacaaagaaacagaccaggaaugcuaguauuaacacccacacgagaauuagcacuacagguugaaggggaauguugcaaauacucauacaaagguuuaagaucagucugcguuuauggcggaggaaauagagaugaacaaaucgaagaauuaaaaaaagguguugacauaauaauagcaaccccagguagacucaacgauuuacagaugucgaauuuuguaaauuuaaaaaacauaaccuaccuuguacuugaugaagcagacaaaaugcuagacaugggguuugaaccacaaauaaugaaaauauuauuggacguaaggccagacagacaaaccguaaugacaucagcaacauggccucauaguguucaucgacucgcacaaucauaucuaaaagaaccuaugauaguauacgugggaacguuagaucuuguagcagucuccucagucaaacaaaauauaauuguaacaacugaagaagaaaaauggagccauaugcaaacauuucuacagagcaugucaucgacagacaaagucauaguauucguaaguaggaaggcagucgcagaccaccuuagcagcgaucucauauuaggaaauaucaguguugaaagccuacacggagauagagaacaacgagaccgagaaaaagcauuagaaaauuuuaaaacaggaaaaguacguauacuaauagcuacagacuuagcuucacgaggauuagacguacacgacgucacacauguauauaauuuugauuuuccaaggaacauagaagaauacgugcaucggauaggaaggacgggaagagccggaagaacagguguaucaauaacaacacuaacaagaaaugauuggagaguggccagcgaauuaauaaauauauuagaaagggcaaaucaaucuauacccgaagaauuaguaaguauggcagaaagauuuaaagcacaucaacaaaaacgagaaauggagagaaaaauggaacgaccacaaggacgaccaaaaaaauuccacuaa

SEQ ID NO: 3742 - RNA, 1209 nt, Artificial Sequence
  ACD02430 variant
auggcacaaaaagaaggaggaagaacaguaccauguuguucacgaccaaaaguugcugcuuuaacagcaggaacucuauuacuacuaacagcgauaggugcagcaaguugggcaauuguagcaguauuacuaagaucagaucaagaaccucuauauccaguacaaguaaguagugcagaugccagauuaaugguauuugauaaaacagaaggaacuuggagauuacuaugcaguaguagaaguaaugcaaggguagcaggacugagcugcgaagaaauggguuuucuaagagcacuaacacauucggaauuagacguuaggacugcaggagcaaauggaacaaguggguucuuuuguguagaugaaggaagauuaccacauacacagagacuauuagaaguaauaaguguaugugauuguccuagaggacgauuucuagccgcaauaugucaagauugugggaggagaaaauuaccaguagauagaauaguagguggaagagauacaagucuaggaagguggccauggcaaguaagucuaagguacgauggugcacauuuauguggaggaucauuacuaucaggggauugggugcuaacggcagcacauuguuucccagaacgaaaucgaguacuaaguagauggagaguauuugcuggagcaguugcacaagcaucaccucauggacuacaauuaggaguucaagcaguaguauaccaugguggauacuuaccuuucagagauccaaacucggaagaaaauaguaaugauauagcauugguucaucuaucaaguccauuaccauuaacagaauauauacaaccaguauguuugccagcagcaggacaagcauugguagaugguaaaauauguacaguuacaggauggggaaauacacaauauuauggacaacaggcaggaguauuacaagaagcaagaguaccaauaauaagcaaugauguauguaauggagcagauuuuuacggaaaucaaauuaaaccaaaaauguuuugugcaggauauccagagggagguauagaugcaugucaaggagacaguggaggaccauuuguaugugaagacaguauaagcagaacaccaagauggagauuauguggaauaguuaguuggggaacuggcugugcauuagcacaaaaaccgggaguauauacuaaaguaagugacuuuagagaauggauuuuucaauaa

SEQ ID NO: 3743 - RNA, 1254 nt, Artificial Sequence
  AAA36013 variant
auggcacaaaaagaaggagguagaacgguaccguguuguucgagaccuaaaguugcugcauuaacugcuggaacucuauuauuauugacagcuaucggagcagcaaguugggcuauuguagcagugcuauuaagaucagaucaagaaccauuauacccaguacaaguaagcagugcagaugcaagguuaaugguauuugauaaaacagaaggaacauggagauuacuauguaguagcagaucgaaugcaagaguagcaggacuaucaugugaagaaaugggauuucuaagagcacugacccacagcgaauuagacguaagaacagcaggagcaaaugguacaucaggauuuuuuugugucgacgaaggacgauuaccccauacacaaagguuauuggaaguaauaaguguaugugauuguccgagaggaagauuucuagcagcuauaugucaagauugugguagacgaaaauugccaguagacagaauaguaggagguagagauacuaguuuaggaagauggccuuggcaaguaucauugagauaugauggagcacauuuaugcggaggaucauuauuaaguggcgauuggguauugacagcagcacauugcuuuccagaaagaaauagaguauuaucuagauggagaguauuugcaggagcaguagcacaagcaucaccacauggauuacaauuaggaguucaagcaguaguauaccacggaggauacuuaccuuuuagagauccaaacagcgaagaaaauucaaaugauauagcacuuguacauuuaucaucaccauuaccacuaacugaauauauacaaccaguuugucuaccagcagcgggacaagcacuaguagauggaaaaauaugcacaguaacaggauggggaaauacacaauauuauggacaacaagcagggguauuacaggaagcaagaguaccaauaauaucaaaugauguauguaacggugcagauuuuuacggaaaccaaauaaaaccaaaaauguuuugugcuggauauccugaaggaggaauagaugcaugucaaggugacaguggaggaccauuuguuugcgaagacucaauaagcagaacaccaagauggagguuauguggaauaguuaguuggggaacaggaugugcauuagcacaaaagccaggaguuuauacaaaaguaagcgauuuuagagaauggauauuucaagcuauaaaaacacauucagaagcaucagguaugguaacacaauuauaa

SEQ ID NO: 3744 - RNA, 2940 nt, Artificial Sequence
  BAG62073 variant
auggaauuagccgcuuuaugccgaugggguuuacuauuagcucuauuaccacccggagcagcaagcacacaagacaauuaucuuucaacagacguaggaucauguaccuuaguuugccccuuacacaaccaagaaguaaccgccgaagacgguacccaaagaugcgaaaaauguucaaaacccugugcacgaguuuguuacggauuaggaauggaacaccuacgcgaaguaagggcaguuacuucagcaaauauacaagaauuugcagguugcaagaaaauauuugguucccuagcuuuccuaccggaaucuuuugauggagacccagcaucuaauacugcaccacuacaaccugaacaacuccaaguauucgaaacucuagaagaaaucaccggauauuuauauauuucagcauggccagauucacugccagaucuaucaguauuccaaaauuuacaaguaauuagagggagaauacuacauaauggagcauacagccuaacguuacaaggucuaggaauaucaugguuaggauugcgaucauuaagagaauuaggaagugguuuagcacuaauucaucacaacacccauuuaugcuuuguucacacaguuccaugggaucaacuauuuagaaauccgcaccaagcucuauuacacaccgcaaauagaccagaagaugagugugugggugaagguuuggcuugccaccaauuaugcgcgcgaggccauuguuggggaccugguccaacacaaugcguaaauuguucccaauuuuuaagaggacaagaaugcguugaagaaugccgcguacuccaaggacucccaagagaauacguaaaugcaagacacugccucccgugucauccugaaugccaaccccaaaacgguucagucacauguuuuggaccagaagcagaccaauguguagccugugcccauuacaaagauccaccauucugcguagcaagaugcccuucagguguuaaaccagaccuaaguuauaugccuauauggaaauuuccagacgaagaaggugcaugucaaccauguccuauaaauugcacgcacucaugcguagauuuggaugacaaaggcugcccagcagagcaaagggcaucaccauugacgucaauaauaagcgcaguuguaggaauauuacucguaguuguucuaggaguuguuuuuggaauauuaauuaaacguagacagcagaaaauuagaaaguauaccaugcgaagauuauuacaagaaacugagcuaguugaaccuuuaacaccuucuggagcaaugcccaaucaagcccaaaugagaauacugaaggaaacagaacuucgaaaaguaaaaguucuuggaucuggugcauuuggcacuguuuauaaaggaauauggauaccagauggagaaaacguaaaaauaccgguagcgauuaaaguacuuagagaaaacacaucaccuaaagcaaacaaagaaauauuagacgaagcguacguaauggccggugucggaucacccuacguaaguagauuacuuggaaucugucuuacaaguaccguacaauuaguuacacaauuaaugccuuauggauguuuacuugaccauguucgagagaaucgagguagauuaggaucacaagaucuacuaaacugguguaugcaaauugcuaaaggaaugucuuaucucgaagauguuagauuaguccauagagaccuagccgcaagaaacguucuaguaaaaaguccuaaucacguaaaaauaacagauuuuggauuagcacgucuuuuagauauagaugaaacagaauaucaugcugacgguggcaaaguaccuaucaaauggauggcgcucgagagcauuuuaagacgacguuucacacaucaaagcgauguauggucauacggugugacaguaugggaauuaaugacauuuggagcaaaaccuuaugauggcauacccgcucgagagauaccagacuuauuagaaaaaggagaacgauuaccacaaccaccuauuuguacuauagacguauauaugauaaugguuaaguguuggaugauagacagugaauguagaccaagauuuagagaauuaguuucagaguucucaagaauggcacgugauccacaacgauuugugguaauacaaaaugaagacuuaggaccugcaaguccacuagauucaacauuuuauagaucacuucucgaagaugaugauaugggagaccuuguagaugcugaagaauacuuaguaccacaacaagguuucuuuuguccugauccagcacccggagcaggagguaugguacaucaccgacauagaagcaguagcacaagaucaggaggaggcgaucuuacacuuggacuugaacccagugaagaagaagcaccuagaaguccgcuagcaccaagugaaggcgcggguagugaugucuuugauggggauuuagguaugggagcagcaaagggacuucaaucacuuccuacacaugauccaucuccguuacaaagguauagugaagauccaacgguaccacuaccaucagaaacagauggauauguagcacccuuaacauguagcccacaaccagaauacgucaaucaacccgacguaaggccccaaccaccaucaccaagagaaggucccuuaccagcugcaagaccugcuggugcaacuuuagaaagaccuaaaacauuaaguccagggaaaaacgggguaguaaaagacguauuugcauuuggaggagcaguagaaaauccagaauaucugacgccccaagguggcgcagcaccccaaccacauccacccccagcauuuaguccagcauucgacaaucuguacuacugggaccaagauccaccggaaaggggcgcuccaccaaguaccuuuaaaggcacaccgaccgcagaaaacccugaauauuuaggacuugaugugccuguguaa

SEQ ID NO: 3745 - RNA, 264 nt, Artificial Sequence
  CCQ43016 variant
augaugagaaugaaaacauucguaaugauacacuuccaccuaaugaacggaggaaaagcaaaacuauacucaagaccacacgcaaaacuacuaccagaacaaagaguaacagacaaaacaggagcaccaguagaauggccaggacaaacacaaugcucaacagaaacacaaacacuagcagcaaugccagcacaagcaguaaugagaguaacaugcacaguaguagacaugcacaaaucagaaugcgcaccagcacaaacauaa

SEQ ID NO: 3746 - RNA, 3768 nt, Artificial Sequence
  AAI67147 variant
auggaauuagcugcauuaugucguuggggccuuuuauuagcacuguuaccacccggugcggcaaguacccaaguauguacaggaacugauaugaaauuaagacuacccgcaucaccugaaacacaucuagacaugcuaagacaucuauaucaagggugucaaguuguacaggguaauuuagaacuuacuuaccuaccuacaaacgccucgcuaaguuuucuacaggacauacaagaaguccaaggcuacguauuaauugcccauaaccaaguacgacaagugccgcuacaaagacuacgcauuguacguggaacacaauuauuugaagacaauuaugcacuagccguauuggauaauggugacccacuaaauaauacuacacccgugacuggagcuagucccgguggucucagagaacuacaauuacggucacuuacugaaauucucaaaggaggaguccucauucaaaggaauccacaacuaugcuaccaagauacuauucuauggaaggauaucuuucauaaaaauaaccaauuagcacuaacacuaauugauacaaaucgaaguagagccugucacccauguuccccuauguguaaagguagccgaugcuggggugaaucgucagaagacugccaaucacugaccaggaccguuugcgcaggcgguugugccagaugcaaagguccgcucccuacugacuguugccaugaacaaugugccgcaggauguaccggaccgaaacauucagauugccuugccugucuucacuuuaaucacucaggaauaugugaacugcacuguccggcucuaguaacguauaauacagauacauuugaaaguaugccuaacccggagggacgcuauacuuuuggugccuccuguguaaccgcuuguccauacaauuaucuuucaacagauguuggcucauguacauuaguuuguccuuuacauaaucaagaaguaacagcggaagaugggacacaaagaugcgaaaaaugcucgaaaccaugugcaagaguuuguuacggauuaggaauggaacaucuaagagaaguaagagcaguuacaucugcaaauauacaagaguuugcuggauguaagaaaauauucgguucucucgccuuccuaccagaaucauuugacggugaucccgcuucuaacacugcgccacuacaaccggaacaauuacaaguauucgaaacauuagaagaaaucaccgguuaucuauauaucucggcuuggccagauaguuuacccgauuuaaguguauuccaaaaucuucagguuauacgugguagaauauugcauaacggagcauacucccuaacguuacaaggacuagguauuucaugguuaggacuacguuccuuaagagaauuaggaucagguuuggcuuuaauacaccacaacacacacuuauguuucguucauacagugccaugggaucaauuauuuagaaauccccaucaagcgcuucuucauacagcaaauagaccugaagaugaauguguaggagaaggucuagcaugccaucaauuaugugcuagaggccauuguuggggaccaggcccuacgcaaugcguaaacuguucucaauuuuuaagagggcaagaauguguggaagagugcagaguguugcaagguuuaccaagagaguauguuaaugcucgccauuguuuaccaugucauccagaaugucagccacagaauggaucuguuacaugcuuuggacccgaagcggaucaauguguagcaugcgcccauuacaaagauccaccuuuuugcguggcacgaugcccaagugguguuaaaccagaucuaucauacaugccuauauggaaauucccggaugaagaaggggcaugucaacccuguccaauaaauugcacucacucauguguugaccuugaugauaaaggauguccugcugaacaaagagcuucaccguugacuucaauaauaucugccgugguuggaauacucuuaguuguaguacugggaguaguauuuggcauauuaauuaaacguaggcaacagaaaaucagaaaauauacaaugaggagauuacugcaagaaacugagcuagucgaaccauugacuccaucaggcgcaaugccuaaucaagcgcaaaugagaauacuuaaagaaacagaacuaaggaaaguaaaaguccuuggaucuggggcauuuggcaccguauacaaaggaauauggauuccugauggagaaaauguaaaaauaccaguugccauuaaaguacucagagaaaauacuucacccaaagccaauaaagaaauauuagaugaggcuuauguaauggccggaguuggaucaccuuacguaaguagacuucucggaauaugccugacauccacuguacaauuaguuacucaauuaaugccuuacggcugccuuuuagaucaugucagagaaaauagaggaagauuagguucacaagaccucuugaauugguguaugcaaauugcuaaagggaugagcuacuuggaagauguucggcuuguacaucgcgaccuagcugcgagaaaugucuuagugaaaucaccuaaucacguaaaaauaacggacuucggacuagcuagacuccucgauauagacgaaacagaauaucaugcagauggaggaaaaguuccaauaaaauggauggcauuggaaucuauuuuaagaagacgauucacucaucaaucagaugucuggucauauggaguuaccguaugggaacuuaugacauuuggugcaaaaccauaugaugguauuccugcacgagaaauccccgauuuacuagaaaaaggugaaagacuaccccaaccaccuauauguacaauagauguauacaugauuaugguuaaauguuggaugauagauucagaaugccguccaagauuuagagagcuaguaagcgaguucucacgaauggcccgggacccucaaagauuuguaguuauucaaaaugaagacuuaggaccagcuucaccccuagauucaacguuuuauagaagucuucuagaagacgacgacaugggagaucuuguagacgcagaagaauauuuaguuccacaacaaggcuucuuuugcccggauccagcacccggagcuggcggcaugguucaucacagacaucgaucaaguucaacucgaucaggaggcggagauuuaacauuaggucuagaaccuucugaagaagaagcuccuagaucacccuuagcuccaagcgaaggagcggguucugauguauuugauggggaucuugggaugggugcagccaaaggauuacaaucccuccccacacacgauccauccccauuacaaagauauucugaagacccaacuguaccauuaccauccgaaacagauggcuacguagcaccacuaaccuguagcccacaaccagaauauguuaaucagccagauguacgaccucaaccaccuucuccuagagaaggcccucucccagcugcccgaccagcuggagcuacgcuagaaagaccuaagacccucucuccuggcaaaaacggaguaguaaaagacguuuuugcauuuggaggggcgguggaaaauccagaauaucuaaccccucaaggaggagcugcaccucaaccacauccuccuccagcauuuuccccagcauuugacaaucuauacuauugggaccaagauccacccgaaagaggagcaccacccucaaccuuuaagggaacacccacagccgaaaauccugaauaucuuggacuagauguuccaguuuaa

SEQ ID NO: 3747 - RNA, 1260 nt, Artificial Sequence
  AAD56009 variant
auggaauuagccgcccucuguagauggggauuauuauuagcauuacuaccaccaggugccgcuucaacucaaguauguacaggaacagacaugaaacuaagacuuccagcuucaccagaaacacacuuagauaugcuaagacacuuauaucaaggaugucaagucguacaaggaaaucuagaauuaacauacuuaccuacaaaugcaucacuaucauuucuacaagauauccaagaaguacaaggcuauguauuaaucgcacacaaucaaguacgacaagucccacuacaaagauuaagaauaguaagaggaacacaacuauucgaagacaacuaugcacuagccguccuugacaauggagauccuuuaaacaacacaacccccguaacaggagcaucaccaggcggacuuagagaauuacaacuaagaucacuaacagaaauuuuaaaagguggaguuuuaauccaaagaaauccacaauuaugcuaucaagauaccauuuuauggaaagauaucuuucacaaaaacaaucaauuagcacuaacgcuuauagauacaaauagaucaagagcaugucauccauguaguccaaugugcaaaggaucacgaugcuggggcgaaucauccgaagauugccaauccuuaaccagaaccguuugcgcuggaggaugcgcaagauguaaaggaccacuuccaacagacuguugucaugaacaaugcgcagcaggaugcacaggaccaaaacauucagacuguuuagcuuguuuacacuucaaucacaguggaauuugcgaacuucacugcccagcauuaguaacuuauaauacagauaccuuugaaucuaugccaaauccagaaggaagauacacauucggagcaucauguguuacugcuuguccauauaacuacuuaucaaccgacguagguuccuguacauuaguauguccacuccauaaucaagaaguuacagccgaagacggaacacaaagaugcgaaaaauguucuaaaccuugcgcaagaggaacacauucauuaccaccaagaccagcagcuguaccaguuccacuaagaaugcaacccgguccagcccauccaguacuaucauuuuuaagaccaucaugggaccucguaucugcuuucuauucccuaccauuagcaccccuaagucccaccucaguacccauaucaccaguaucaguaggaagagguccagauccugaugcucauguagcuguagaucuaucaagauaugaaggauaa

SEQ ID NO: 3748 - RNA, 546 nt, Artificial Sequence
  U70863.1 variant
ggaagucauaguaugagauauuucuuuacaaguguaaguagaccaggaaggggagaaccaagauuuauagcaguaggauauguagaugauacacaauuuguaagauuugauagcgaugcagcaagccaaagaauggaaccaagagcaccauggauagaacaagaaggaccagaauauugggauggagaaacaagaaaaguaaaagcacacagucaaacacauagaguagaucuaggaacauuaaggggauauuauaaucaaagugaagcaggaagucauacaguacaaagaauguauggaugugauguagggagugacuggagauuuuuaagaggauaucaucaauaugcauaugauggaaaagauuauauagcauuaaaagaagauuuaagaaguuggacagcagcagauauggcagcacaaacaacaaaacauaaaugggaaacagcacauguagcagaacaauuaagagcauaucuagaaggaacauguguagaaugguuaagaagauauuuagaaaacggaaaagaaacauuacaaagaaca

SEQ ID NO: 3749 - RNA, 543 nt, Artificial Sequence
  AH009136.2 variant
agucauaguaugagauauuucuuuacaaguguaaguagaccaggaagaggagaaccaagauuuauagcaguaggauauguagaugacacacaauuuguaagauucgauucagaugcggcaagucaaagaauggaaccaagagcaccauggauagaacaagaaggaccagaauauugggauggagaaacaagaaaaguaaaagcacacucacaaacacauagaguagauuuaggaacauuaagaggauauuauaaccaaagugaagcaggaagucauacaguacaaagaauguauggaugugacguaggaucagacuggagauuuuuaagaggauaucaccaauacgcauacgauggaaaagauuauauagcacuaaaagaagauuuacggucauggacagcagcagauauggcagcacaaacgacaaaacauaaaugggaagcagcacauguagcagaacaauuaagagcauaucuagaaggaacaugcguagaaugguuaagaagguaucuagaaaacggaaaagaaacauuacaaagaaca

SEQ ID NO: 3750 - RNA, 705 nt, Artificial Sequence
  AAG09781 variant
auguuaagaguaccagaaccaagaccgggagaagcaaaagcugaaggagcagcaccaccaacaccaucaaaaccacuaacaaguuuccuuauccaagacauacuaagagacggagcacaaaggcaaggaggaagaacaucaucacaaagacaaagagauccagaaccagaaccagaaccagaaccagaaggaggaagaucaagagcaggagcucaaaacgaccaacuaucaacaggaccaagagcagcaccagaagaagcagaaacacucgcagaaacagaaccagaaagacaccuaggaucauaccuacuagauagugaaaacacaucaggagcauuaccaagacuaccacaaacaccaaaacaaccacaaaaacgcucaagagcagcauucucacacacacaaguaauagaacuagaaagaaaauucucacaccaaaaauacuuaucagcaccagaaagagcacaccuagccaaaaaucuaaaacuaacagaaacacaaguaaaaauaugguuccaaaacagaagauacaaaacaaaaagaaaacaauuaagcucagaauuaggagacuuagaaaaacacucaucacuuccagcacuaaaagaagaagcauucucaagagcaucauuaguaucaguauacaacagcuacccauacuacccauaccuauacugcguaggaucauggucaccagcauucugguaa

SEQ ID NO: 3751 - RNA, 942 nt, Artificial Sequence
  BAG37303 variant
auggcaagcuuuagaaaacuaacacuaucagaaaaaguaccaccaaaccacccaagcagaaaaaaaguaaacuuuuuagacaugucccuagacgacauaauaauauacaaagaacuagaagguacaaacgcagaagaagaaaaaaacaaaagacaaaaucacucuaaaaaagaaucaccaucacgacaacaaucaaaagcacacagacauagacacagaagagauuacucaaggugcagaaguaacagcgaagaaggaaaucacgacaaaaaaccaucacaaaaaccaucaggauucaaaucaggacaacauccacuaaacggacaaccacuaauagaacaagaaaaaugcucagauaacuacgaagcacaagcagaaaaaaaucaaggacaaucagaaggaaaccaacaccaaucagaaggaaacccagacaaaagcgaagaaagccaaggacaaccagaagaaaaccaccauucagaaagaaguagaaaccaucuugaaagauccuuaagucaaagcgacagaucacaaggacaacugaaaagacaucacccacaauacgaaagaucacacggacaauacaaaagaucacacggacaaucagaaagaucacacggccacagcgaacgaucacacggacacucagaaagaucacacggccacucagaaagaucacacggacacucaaaacgaucaagaucacaaggagaccuaguagacacacaaucagaucucauagcaacacaaagagacuuaaucgcaacacaaaaagauuuaauagcaacacaaagagaccuaauagcaacacaaagagauuuaauaguaacacaaagagauuuaguagcaacagaaagagaccucauaaaucaaagcggaagaagccacggacaaucagaaagacaucaaagauacagcacaggaaaaaacacaauaacaacauaa

SEQ ID NO: 3752 - RNA, 942 nt, Artificial Sequence
  AAI28135 variant
auggcaucauucagaaaacuaacacuaucagaaaaaguaccaccaaaccauccaagcagaaaaaaaguaaacuuccuagacaugagcuuagacgacauaauaauauauaaagaacuagaaggaacaaacgcagaagaagaaaaaaauaaaagacaaaaccauaguaaaaaagaaagcccaucaagacaacaaucaaaagcacacagacacagacauaggagaggauacagcagaugcagaagcaacucagaagaaggaaaccacgacaaaaaaccaucacaaaaaccaagcggauuuaaaucaggacaacacccacuaaacggacaaccacuaauagaacaagaaaaauguagcgacaauuacgaagcacaagcagaaaaaaaccaaggacaaagugaaggaaaucaacaccaaagcgaaggcaacccagacaagucagaagaaucacaaggacagcccgaagaaaaccaccacagcgaacgaucaagaaaccaucuagaaagaucccuaucacaaagugauagaucacaaggccaauuaaaaagacaccauccacaauacgaacgaucacacggacaauacaaaagaagccauggccaaucagaaagaucacacggucacagcgaaagaucacauggccauucagaaagaucacauggccacucagaaagaucacacggacacagcaaaagaucaagaagccaaggagaccuaguugauacacaaucagaucuaauagcuacacaaagagaccuaauagcaacacaaaaagaccuaauagcaacacaaagagaccuaauagcaacacaaagagaccuaauaguaacacaaagagauuuaguugcaaccgaacgagacuuaauaaaccaaucaggacgaucacacggacaaagcgaaagacaucaaagauauagcacaggaaaaaacacaauaacaacauaa

SEQ ID NO: 3753 - RNA, 384 nt, Artificial Sequence
  12543784 variant
augauaaaaaaaaaccuaaaaaaacuaggaauagaagaaacauaccuaaacauaauaaaagccauauacgacagaccaacagcaucaauacaaaaaacagaaaaccuaucaacaaaaacaggaacaucacaagaauaccaccuaucaccacuaugguucuacauaguacuagaaauacuagcaucaacaauaagacaagaaaaaaaccuaaaagacauacacacagaaaaagaagaaguaaaacuaucacuauucgcagacgcaaugauacuauaccucaaaaaaccaaacgacucaacacgaaaacuacuagaacuaauaaaaaaaauacacucaucaugccgaauaaaaauaaacauacacuucgccuucugcucacaauaa

SEQ ID NO: 3754 - RNA, 1926 nt, Artificial Sequence
  AAA63226 variant
auggcaaaagcagcagcaauagggauagaucuagguacaacauauucauguguuggaguauuccaacauggaaaaguagaaauaauagcaaacgaucaaggaaacagaacaacgccaucuuauguagcauucacagauacugaacgacugaucggagacgcugccaaaaaccaaguugcacuaaauccacaaaacacaguauuugacgcaaaaagacuaauuggaagaaaauucggugacccaguaguacaaagcgauaugaaacacuggccguuccaaguaaucaacgauggagacaaaccaaaaguccaaguaucauacaaaggugaaacaaaagcauucuacccugaagaaauuaguucaaugguauuaacuaagaugaaagaaauagcagaagcauaucuaggauacccaguaacaaaugcagucauaacuguuccugcauacuucaaugacucccaacgacaagcaacaaaggacgcaggaguaauagcugguuuaaaugucuuaagaauaauaaaugaaccaacagcggccgcaauagcuuacggacuugauagaacgggaaaaggagagagaaauguacucauauuugaccuaggaggaggaacauucgauguaucaauauuaacuauugaugacggaauauuugaggucaaagcaacagcaggagauacacacuugggaggggaagauuucgauaaucgauugguaaaccauuucguggaagaauuuaaaagaaaacauaagaaagauauaagccaaaauaaaagagcuguucgaagguuaagaacagcaugcgagagagccaaaagaacauuaaguucaucaacacaagcaagccuagaaauagacucucuuuuugaaggaauagauuuuuauacaaguauuacacgcgcacgauucgaagaacuauguuccgaucuauuucgcaguacccuagaaccaguugaaaaagcucuaagagacgcaaaacuagacaaagcacaaauacaugauuuaguauuaguaggaggaucaacacggauaccaaaaguacaaaaacuucuccaggauuucuuuaauggaagagaucucaacaaaucaauaaauccagaugaagcaguugcauauggagcagcgguucaagcagcuauacuaaugggagacaaaagcgagaacguucaagauuuacuauuauuggauguugcaccacugucauuaggacuagaaacagcuggaggagucaugacagcuuuaauuaaaagaaacucaacgauacccacaaaacaaacacaaauauuuaccacauauucagacaaucaaccagguguuuuaauacaaguauaugaaggggaaagagcaaugacaaaagacaauaaccuccucggacgauuugaauuaucaggaauacccccagccccaagaggagucccucaaauagaaguuacuuuugauauagaugcuaaugggauacugaauguaacagcuaccgauaaaaguacaggaaaagcaaacaaaauaacaauaacaaacgauaaaggacgacuaagcaaagaagaaauagaaaggaugguacaagaagcugaaaaauauaaagcagaagacgaaguacaaagagaaagaguaucugcuaaaaaugcauuagaaucauacgcauucaauaugaaaagcgcaguagaagacgaaggacuuaaaggaaaaauaagugaagcagauaaaaagaaaguauuagacaaaugucaagaaguaauaucauggcuugaugcaaauaccuuagcagaaaaagaugaauuugaacauaaaagaaaagaauuagaacaaguaugcaauccaauuauaagugguuuauaucaaggcgcaggaggcccagggccagggggauuuggagcucaaggaccuaaaggaggaaguggaucagggccuacaauagaagaaguugacuaa

SEQ ID NO: 3755 - RNA, 1926 nt, Artificial Sequence
  AAA63227 variant
auggcaaaagcagcggcaaucggaauagacuuaggaaccacauacagcuguguuggaguauuucaacacggaaaaguagaaauaauagcaaacgaucaaggaaauagaacaacaccaagcuacguagcauucacagauacagaacgacugauaggagaugcugcaaaaaaucaaguggcauuaaauccacaaaauacagucuuugaugcaaaaagacuaauagggagaaaauuuggugauccuguaguacaaagcgauaugaaacauuggccauuccagguaauaaacgacggagauaaaccaaaaguacaggucagcuacaaaggagaaacaaaagcauuuuacccugaggaaauaaguaguaugguucuaacaaaaaugaaagaaaucgcagaagcauaucuaggcuauccagucacaaacgcagucauaacaguaccagcauacuuuaacgacucacaaaggcaagcaacgaaagaugcaggagucauagcagggcuuaaugucuuaagaauuauaaaugaaccaacagcagcagcaauagcauauggacuugauagaacgggaaaaggagaaaggaauguccuaauauucgacuuaggaggaggaacuuuugacguaaguauacuuacaauugacgauggaauauuugaaguaaaagcaacagccggagauacccaccuaggaggagaagacuuugauaacagauuaguaaaccauuucguagaagaauucaaacgaaaacacaaaaaagauaucucacaaaauaaaagagccguaagaagauuaagaacggcaugugaaagagcaaaaagaacauuaaguaguagcacacaggcaagccuagaaauugacagucuauuugaaggaaucgauuuuuauacaucaauaacacgagcaagauuugaagaacuaugcucagaccucuuuagauccacauuagaacccguugaaaaagcacuaagagacgcaaaauuggauaaagcucaaauacaugacuuaguauuaguaggagguagcacaagaauaccgaaaguucaaaaauuacugcaagacuuuuuuaauggaagagauuuaaacaaaucgauaaauccagaugaagcagucgccuacggagccgcugugcaagcagcuauucuaaugggagauaaaagcgaaaauguucaagacuuauuauuauuagacguagcaccauuaucauuaggguuggaaacagcaggagggguaaugacagcacuaauaaagagaaauucaaccauaccaacaaaacaaacucaaauauuuacaacauauucugauaaucaaccaggaguauuaauacaaguuuacgaaggagaaagagcaaugacuaaagauaauaauuuauuagguagauuugaauuaaguggaauaccaccagccccaagaggaguaccacaaauagaaguaacuuucgacauugaugcaaacggaauccuaaacgucacagcgacugauaaaucaacaggaaaagcuaauaaaaucacaauaacaaacgauaaaggaagauuaucaaaagaagaaaucgaacgaaugguacaagaagcugaaaaauacaaagcagaagacgaaguucagagagaaagaguuucagcuaaaaacgcauuagaaucauacgcauuuaacaugaaaucagcaguagaagaugaaggacuaaaaggaaaaauaagugaagcagauaaaaaaaaagugcuagacaaaugccaagaaguaauaagcuggcuagaugcaaauacacuagcagaaaaagacgaauucgaacacaaacgaaaagaauuagagcaaguaugcaaucccauuauaucaggauuauaccaaggagcgggaggaccagggccagguggcuuuggcgcacaaggaccaaaaggagggucuggauccgguccaaccauugaagaaguagacuag

SEQ ID NO: 3756 - RNA, 627 nt, Artificial Sequence
  AAI21098 variant
auggcauuaggacaaaaauuauucauaacaaugucaagaggagcaggaagauuacaaggaacauuaugggcauuaguauuccuaggaauauuaguaggaaugguaguaccaucacccgcaggaacaagagcaaauaauacauuauuagauaguagaggauggggaacauuauuaagcagaaguagagcaggacuagcaggagaaauagcaggaguaaacugggaaucaggauauuuaguaggaauaaaaagacaaaggagacuauacuguaacguaggcauaggauuucacuuacaaguauuaccagauggaagaauaagcgggacacaugaagaaaauccauacaguuuauuagaaauaagcacaguagaaagaggaguaguaaguuuauucggaguaagaagugcauuauucguagcaaugaauagcaaaggaagacuauaugcaacaccaucauuccaagaagaaugcaaauucagagaaacauuauuaccaaauaauuauaacgcauaugaaagugauuuauaucaaggaacauauauagcauuaaguaaauauggaagaguaaaaagaggaaguaaaguaucaccaauaaugacaguaacacacuuucuaccaagaauauaa

SEQ ID NO: 3757 - RNA, 1569 nt, Artificial Sequence
  BAA74724 variant
augccacgagcgccacgaugucgagcuguaagaucauuauuaagaucacauuauagagaagucuuaccauuagcuacuuuugucagaagauuaggaccccaggguuggagguuaguacaaagaggcgauccagcagcguuuagagcauuagucgcucaguguuuaguaugcgugccaugggaugcaagaccgcccccugcugcacccagcuuuaggcaaguaucauguuuaaaagaauuaguagcaagaguauuacaaagacuuugugaaagaggcgcuaaaaauguauuagcuuuugguuuugccuuauuagacggagccagaggagggccaccagaagcauuuacaacaaguguaagaaguuaccuaccaaauacaguaacagaugcauuaagaggaucaggugcauggggacuauuauuaagaagaguaggagaugacguauugguacauuuacuagcaagaugcgcucuauucguauuaguugccccaagcugcgcauaucaaguauguggaccaccauuauaccaauuaggcgcugcaacucaagcuagaccaccaccacacgccagugggccaagacguagacuugguugugaacgagccuggaaccacucaguaagagaagcaggagucccauuaggauuaccugcaccaggagccagaagacgagguggaagugcaucaagaucauuaccacuaccaaaaagaccucgacguggcgcagcuccagaaccagaacgaacuccuguaggacaaggaagcugggcacacccagggcgaaccagagggccaagugaucgaggauuuuguguuguaaguccagcaagaccagccgaagaagcaacgucauuggaaggagcauuaaguggaacgagacauucucauccuucaguaggacgucaacaucaugcaggaccacccaguacuucuagaccaccaagaccaugggacaccccauguccaccuguuuacgcagaaaccaaacauuuucuauacucgucuggagauaaagaacaauuaagaccaaguuuucuacuuucaaguuuaagaccaauauuaacgggugcccguagauuaguagaaacuauauuuuuaggcucaucuccaggaugccaagguuuaccugcuggauguccagccugcccuucagcuacaggaaaauguggaccauguuuuuggagcuguuuaggaacaacuagaucagcaccaacaggauguaguucaagaagaacugcacgcugugaauuacgaucaccacaacaaccuguaaguguuccaggcagauccccaagagcauuauggcgaccuccuagaagaagaacucaaacaccaguagcaugguguucaugcucagcaucaaccgcuccauuagcaggaguucgacuaagagcaggacuuccugcuccugcaggagcaccaagaccacucggauuacaagcacaaagaagaagguuuuuacguaauacaaagaaauucauuaguuuaggaaaacaugcaaaacugucacuacaagaacuaacauggaaaaugucaguaagagauugugcaugguuaagacguucacca

SEQ ID NO: 3758 - RNA, 1680 nt, Artificial Sequence
  BAA23606 variant
augcgacuacacagacuacgagcaagguuaucagcaguugcuugcggauuacuacuacuucuuguuagaggacaaggucaagauucagccucacccauuagaacuacacacacuggacaaguuuuaggaagucuuguacacguaaaaggagcaaaugcaggaguacagacauuucuagguauaccauuugccaaaccaccauuaggaccauuacgauuugcuccaccggaaccucccgaaaguuggucaggcgucagggacggaacuacacauccagcaaugugccuacaagaucuaacagcaguagaaagcgaauuucucucacaauuuaauaugacuuuuccaucagauucaaugucagaagacuguuuauaucuuucaauauauaccccagcacauucucacgaaggaucaaaucuuccaguuaugguauggauacauggaggugcauuagucuucggaauggcaagccuauaugaugguucaaugcuugcagcauuagaaaacguaguaguugucauaauacaauacagacucggcguuuuaggauuuuucucaacaggagauaaacaugccacagguaauuggggauaucuagaccaaguagcugcacuacguuggguccaacaaaauauagcacacuuuggaggaaauccugaucgaguaacaauauuuggugaaucagcaggaggaacuucaguaucaucauuaguaguaucuccaauaucacaaggauuauuucauggagcaauuauggaaucaggaguugcauuacuaccaggacuaaucgcaaguagcgccgauguuaucucuacuguaguagcaaaccuaucugcaugcgaccaaguagacucagaagcauuaguuggaugucuaagaggaaaaucaaaagaagaaauacuagcaauaaacaaaccguucaaaaugauaccaggaguaguagauggaguauuucuaccaagacauccacaagaacuccuugcaucugcagacuuucaacccguuccuucuauaguugguguaaacaauaacgaguuuggauggcuuauaccuaaagucaugagaauauaugacacucaaaaagaaauggauagagaagcaagucaagcagcacuacaaaaaaugcuaacauuguuaauguuaccaccaacuuucggugauuuacuacgagaagaauacauuggagauaacggagacccccaaacauuacaggcacaauuucaagaaaugauggcagauucaauguuuguaauacccgcauuacaaguagcacauuuccaauguucaagagcaccaguuuauuuuuacgaauuucaacaccaacccucauggcuuaaaaauauccgacccccucauaugaaagcagaccacggagacgaauuaccauuuguauuuagauccuucuuuggagguaauuauauuaaauucacagaagaagaagaacaauuaucaagaaaaaugaugaaauacugggccaauuucgccagaaacggaaauccaaauggagagggauuaccacauuggccacuauuugaucaagaagaacaauaucuacaacuuaaccuacaacccgcaguagguagagcacuuaaagcccaccgauuacaauucuggaaaaaagcauuaccacaaaaaauacaagaacuagaagaaccugaagaaagacauacagaauuauaa

SEQ ID NO: 3759 - RNA, 1740 nt, Artificial Sequence
  AAH65269 variant
augaacaaacuauacauaggaaacuuaucagaaaacgcagcacccucagaccuagaaucaaucuucaaagaugcaaaaauacccguaucaggcccauuccuaguaaaaacaggauacgcauuuguagacugcccugacgaaucuugggcccucaaagcaauagaagcccuuucuggaaaaauagaacuacauggcaaaccuauagaaguugaacacucaguucccaaacgacaacgaauaagaaaauuacaaaucagaaacaucccaccacaccuacaaugggaaguauuagauucauuauuaguacaauacggagucguagaaucaugcgaacaaguaaacacagauucagaaaccgcuguaguaaacgucaccuacucaucaaaagaccaagcaagacaagcacucgacaaacuaaauggcuuccaacuagaaaacuucaccuuaaaaguagcauauauacccgacgaaauggcagcucaacaaaauccauuacaacaaccccgcggaagaagaggacuaggacaaagagguaguuccagacaaggaucaccaggaucaguaaguaaacaaaaaccuugugaccuaccauuaagacuacuaguuccuacacaauucguaggcgcaauuauagguaaagaaggagccacuaucagaaauauaacaaaacaaacacaaucaaaaauagacguccacagaaaagaaaacgcaggcgcggcagaaaaaucaauaacaauacuaaguacaccagaaggaaccucagccgcaugcaaauccauccucgaaauaaugcacaaagaagcacaagacauaaaauuuacagaagaaauaccacuaaaaauauuggcacauaacaauuucguaggacgucuaaucggaaaagaaggccgaaauuuaaaaaaaauagaacaagauacugauacaaaaauaacaauaagccccuuacaagaacuaacacuguacaauccagaacgcacaauaacagucaaaggaaauguagaaacaugugcaaaagccgaagaagaaauaaugaaaaaaauaagagaaucauaugaaaaugacauagcaucaaugaaccuccaagcacaccuaauccccggauuaaacuugaaugcccucggauuauuuccaccaacgagcggaaugccuccaccaacaaguggacccccaucagcuaugacaccaccauauccacaauucgaacaaagcgaaaccgaaacuguacaucuauuuaucccagcacuuagcguaggugcgauaaucggcaaacaaggucaacauaucaaacaauuaucucgcuucgcaggagccucaauaaaaauagcucccgccgaagcacccgacgccaaaguccguaugguaauaauaacaggaccacccgaagcacaauuuaaagcucaaggaagaauauacgguaaaaucaaagaagaaaauuuugucaguccaaaagaagaaguaaaacuggaagcccacauaagaguaccuucauuugcagcaggacgaguaauaggaaaaggaggaaaaacuguaaaugaauuacaaaaucuaucaucagccgaaguaguaguaccuagagaccaaacacccgacgaaaaugaucaaguuguaguaaaaauaacaggacauuuuuaugcaugccaaguugcccaaagaaaaauacaagaaauacuaacacagguaaaacaacaccagcaacagaaagcacuacaaaguggaccaccacaaucaagaagaaaauag

SEQ ID NO: 3760 - RNA, 537 nt, Artificial Sequence
  AAA63207 variant
augcacucaucagcacuacuaugcugccuaguacuacuaacaggaguaagagcaucaccaggacaaggaacacaaucagaaaacucaugcacacacuucccaggaaaccuaccaaacaugcuaagagaccuaagagacgcauucucaagaguaaaaacauucuuccaaaugaaagaccaacuagacaaccuacuccuaaaagaaucacuacuagaagacuucaaaggauaccuaggaugccaagcacuaucagaaaugauacaauucuaccuagaagaaguaaugccacaagcagaaaaccaagacccagacauaaaagcacacguaaacucacuaggcgaaaaccuaaaaacacuaagacuacgacuaagaagaugccacagauuccuaccaugcgaaaacaaaucaaaagcaguagaacaaguaaaaaacgcauucaacaaacuacaagaaaaaggaauauacaaagcaaugucagaauucgacauauucauaaacuacauagaagcauacaugacaaugaaaauaagaaacuaa

SEQ ID NO: 3761 - RNA, 1143 nt, Artificial Sequence
  AAB17170 variant
auggcauucguaugcuuagcuauaggaugcuuauacacuuuccuaauauccacaacuuucggaugcacaucuucaucagauaccgaaaucaaaguaaauccaccacaagacuuugaaaucguagacccaggauacuuaggauaccuauacuuacaauggcaaccaccauuaucgcucgaccauuucaaagaaugcacagucgaauacgaauuaaaauauagaaauauagguucagaaaccuggaaaacaauaauaacaaaaaauuuacauuauaaagacggauuugacuuaaacaaaggaauagaagcuaaaauacacacauuacuacccuggcaaugcacaaacggaucagaaguccaaucaucaugggcagaaacaacauacuggauaucaccacaaggcauaccagaaacaaaaguacaagacauggauugcguauacuacaacuggcaauaccuacuaugcucauggaaacccggaauaggaguacuacuugauacaaacuacaacuuauucuacugguaugaaggacuagaccacgcacuacaauguguagauuacauaaaagccgacggucaaaacauaggaugccgcuucccauaucuagaagcaucagacuacaaagacuucuacauaugcguaaauggaucuucagaaaacaaaccuauucgcucaucauacuuuacauuccaacuacaaaacaucgucaaaccacuucccccaguauaccuaacauucacucgagaaucaucuugcgaaauaaaacuaaaaugguccauaccauuaggaccaauaccugcaagaugcuucgacuacgaaauagaaauacgagaagacgacacaacacuaguaacagcaacaguagaaaaugaaacauacacauuaaaaacaacaaacgaaacacgacaacucugcuucguaguaagaagcaaaguaaacaucuauugcuccgacgacggaauauggucagaauggucagacaaacaaugcugggaaggagaagaucucucuaaaaaaacacuacuaagauucuggcuaccauucgguuuuauucuaauauuaguaauauucguaaccggacuacuauuaagaaaaccaaacacauacccaaaaaugaucccagaauuuuucugcgacacauaa

SEQ ID NO: 3762 - RNA, 819 nt, Artificial Sequence
  AAA67527 variant
auggacagcuaccuauuaauguggggacuacuaaccuucauaaugguaccaggaugccaagcugaacuaugcgacgacgacccacccgaaauaccacacgcaaccuucaaagcaauggcauacaaagaaggaacaauguuaaacugugaaugcaaaagaggauucagacgaauaaaauccggaucacuauacaugcuaugcacaggaaacucaucacacucaaguugggacaaccaaugccaaugcacaucaucagcaacacgaaacacaacaaaacaaguaacaccacaaccagaagaacaaaaagaaagaaaaacaacagaaaugcaaucaccaaugcaaccaguagaucaagcaucacuaccaggacauugcagagaacccccaccaugggaaaacgaagcaacagaaagaauauaucacuucguaguaggacaaaugguauacuaccaaugcguacaaggauacagagcacuacacagaggcccagccgaaucaguauguaaaaugacccacggaaaaacaagauggacacaaccacaacuaauuugcaccggagaaauggaaacaucacaauucccaggagaagaaaaaccacaagcaaguccagaaggaagaccagaaagugaaacaaguugccuaguaaccacaacagauuuccaaauacaaacagaaauggcagcaacaauggaaaccucaauauucacaacagaauaccaaguagcaguagcaggaugcguauucuuacuaauaaguguacuccuauuaucaggacuaacauggcaaagaagacaaagaaaaagcagaagaacaauauaa

SEQ ID NO: 3763 - RNA, 1656 nt, Artificial Sequence
  AAA59143 variant
auggcugcaccagcauuauccuggagauuaccauuauuaauauuacuuuuaccacuugcaacaucuugggcaagugcagcaguaaacggaaccagucaauucacauguuucuacaacucaagagcaaauauuucuugcguauggucacaagacggugcauuacaagauacuucaugucaaguucaugccuggccagacagaagaagauggaaucaaacuugcgaacuacuaccaguaagccaagcaucaugggcaugcaaucuaauauuaggagcaccagacucacaaaaacuaacaaccguugauauaguuacauuaagaguuuuauguagagaaggagucagauggcguguaauggccauacaagauuuuaaacccuucgaaaauuuaagacuaauggcaccaauaucacuccaaguaguccacguagaaacccauagauguaauauuagcugggaaauuucacaagcaucucauuacuucgaacgacauuuagaauuugaagcaagaacauuauccccaggucacacaugggaagaagcaccacuacuuaccuuaaaacaaaaacaagaauggauaugcuuagaaacauuaacacccgacacacaauaugaauuucaaguacgaguaaaaccauuacaaggagaguucacaacaugguccccuuggucacaaccuuuagccuucagaacaaaaccagcagcacuaggaaaagauacuauaccauggcuaggucaucuucuagucggacuuucaggagcauuuggauuuauaauccucguauaucuauuaaucaacugucguaauacuggcccaugguuaaagaaaguucuaaaaugcaacaccccagauccaucaaaauucuuuucucaacuguccucugaacauggaggagauguacaaaaaugguuaucaagucccuuuccaaguucuaguuuuucaccagguggacuugcuccagaaauuucaccuuuagaaguacuagaaagagauaaaguuacucaacuauuauuacaacaagauaaaguaccugaaccagcuucccuuucgucaaaccauaguuuaacuucauguuuuacaaaucaaggauacuucuucuuucauuuaccagaugcauuagaaauagaagcaugucaaguuuauuuuacauacgauccuuacucugaagaagauccagacgaaggaguagccggagcuccaacuggaucaucuccacaaccacuacaaccauuauccggcgaagaugaugcauauugcaccuucccuucaagagacgaucucuuacuauuuucuccaucucuauuaggaggaccaucaccuccaucaacagcuccaggaggaaguggugccggagaagaaagaaugccaccuaguuuacaagaacgaguaccaagagauugggauccacaaccuuuaggaccuccaacaccuggaguaccagaucuaguugacuuucaaccuccaccugaauuagucuuaagagaagcuggugaagaaguuccagaugccggaccaagagaaggaguuucauucccauggagcagaccuccaggacaaggagaauuucgagcacuaaaugcacgacuuccacucaacacugaugcauaucuauccuuacaagaacuacagggccaagacccaacccacuuaguauaa

SEQ ID NO: 3764 - RNA, 1110 nt, Artificial Sequence
  AAA59145 variant
auguuaaaacccucauuaccauuuacaucccuacuauuucuacaacucccauuacuaggaguaggacuaaauacaacuauauuaacuccaaacggaaaugaagacacaacagcagauuucuuucuuacaacaaugcccacugacucacucucaguaucaacacuaccauuaccagaaguacaaugcuucguauucaacguagaauacaugaacugcacauggaacuccucaucagaaccccaaccaaccaaucuaaccuuacacuacugguauaaaaacucugacaacgacaaaguacaaaaauguucacauuacuuauuuuccgaagaaauaaccucaggaugucaauuacaaaaaaaagaaauacaccuauaccaaacauucguaguacagcuacaagacccaagagaaccaagaagacaagccacacaaaugcuaaaacuacaaaacuuaguaauaccaugggcaccagaaaacuuaacauuacacaaauuaucagaaucacaacuagaacuaaacuggaacaaccguuuccuuaaucacugccuagaacaucuaguacaguacagaacagacugggaucacucauggacagaacaaucuguagauuacagacacaaauucucccucccaucaguagacggacaaaaaagauacacauuucgcguaagaucuagauucaacccauuaugcggauccgcacaacacugguccgaauggucacacccaauacacuggggcucaaacaccucaaaagaaaauccauuccuauucgcacuagaagccguaguaauaucagucggaucaaugggauuaauaauaucccuauuaugcguauacuuuugguuagaacgaacaaugccaagaauaccaacccuaaaaaaucuagaagaucuaguuacagaauaccacggaaauuuuuccgcuugguccggcguaucaaaaggccuagcagaaucauuacaacccgauuacucagaaagacuauguuuaguauccgaaauuccuccaaaaggaggagcacuuggagaaggccccggagcaucacccugcaaccaacacucccccuacugggccccuccaugcuacacccuaaaaccugaaacauaa

SEQ ID NO: 3765 - RNA, 405 nt, Artificial Sequence
  AAA74469 variant
augagaaugcuacuacaccuaucacuacuagcacuaggagcagcauacguauacgcaauaccaacagaaauaccaacaucagcacuaguaaaagaaacacuagcacuacuaucaacacacagaacauuacuaauagcaaacgaaacacuaagaauaccaguaccaguacacaaaaaccaccaacucugcacagaagaaauauuccaaggaauaggaacacuagaaucacaaacaguacaaggaggaacaguagaaagacuauucaaaaaccuaucacuaauaaaaaaauacauagacggacaaaaaaaaaaaugcggagaagaaagaagaagaguaaaccaauuccuagacuaccuacaagaauuccuaggaguaaugaacacagaauggauaauagaaucauaa

SEQ ID NO: 3766 - RNA, 555 nt, Artificial Sequence
  AAH06487 variant
augguaagaaaacuaaaauuucacgaacaaaaauuauuaaaacaaguagauuucuuaaacugggaaguaacagaucacaaucuacaugaauuaagaguacuaagaagauauagauuacaaagaagagaagacuauacaagauacaaucaauuaaguagagcaguaagagaacuagcaagaagacuaagagacuuaccagaacgagaccaauuuagaguaagagcaagcgcagcacuacuagauaaauuauacgcacuaggauuaguaccaacaagaggaagccuagaauuaugcgauuucguaacagcaaguucauucuguagaagaagauuaccaacaguauuacuaaaacuaagaauggcgcaacaucuacaagcagcaguagcauucguagaacaaggacauguaagaguaggaccagauguaguaacagauccagcauuuuuaguaacacgaucaauggaagacuuuguaacauggguagacagcagcaaaauaaaaagacauguauuagaauauaacgaagaaagagacgauuucgaucuagaagcauaa

SEQ ID NO: 3767 - RNA, 3150 nt, Artificial Sequence
  AAH08786 variant
augggaucuagaacaccugaaucuccacuacacgccguacaauuaagauggggaccuagacgacgaccaccccuauuaccauuacuuuuauuacuccuuccgccgccuccaagaguaggagguuuuaaccuagaugcagaagcacccgcgguauuaagcggaccaccagguucguucuuugguuuuucuguagaguucuaucguccaggaaccgauggcguaucaguacugguuggagcuccaaaagcaaauaccucacaacccggagucuuacaaggaggagcagucuaucuaugucccuggggagcaucacccacccaaugcacaccuauagaguucgacucgaaaggaucacgacuauuagaaaguucucuaucuucaucggaaggcgaagaaccaguagaauacaaaaguuuacagugguuuggagcaacaguuagagcccacggcaguucaauacuugcaugugccccauuauauucuuggagaacugaaaaagaaccgcuaagugauccuguaggaaccuguuauuuaaguacugauaauuuuacacguauacuagaauaugccccaugucgaucugauuuuucuugggcagcaggucaaggauauugccaaggugguuuuucggcagaguucacuaaaacagggagaguaguuuuaggagguccagguucauacuuuuggcaaggacaaauauugucugcaacacaggaacaaauagccgaaucauauuauccagaauaucucauuaacuuaguacaaggucaauuacaaacaagacaggcaucaagcauauaugaugauucuuauuugggauauaguguagcgguaggugaauuuaguggcgaugauacugaagauuuuguggcaggcgucccaaagggcaaucuaacuuacgguuauguaacaauacuaaacggaucagauauucgcucacuauacaauuucucaggagaacaaauggccaguuauuuuggguaugcuguugcggcaaccgacgucaauggagauggauuagaugacuuacuuguaggggccccacuauuaauggacaggacgccagaugguaggccgcaagaaguugguaggguauauguguaucuacaacacccagcugguauagaaccuacaccaacacucacauuaacaggacacgaugaauuuggcagauuuggaucauccuuaacaccacuaggagauuuagaucaagacggauauaacgauguugcuauaggagcuccuuuuggaggugaaacacaacaagguguaguauuuguauuuccuggagguccuggaggauuagguucaaaaccaucacaaguacuacaaccauuaugggcagcaagccauacaccagacuuuuucggaucagcgcugcgcggaggaagagaucuagaugguaauggguauccggauuuaauaguaggaucuuucgguguagauaaggcagucguuuauagaggacgcccaauagucucagcauccgccucacucacuauuuuuccagccauguucaaucccgaagaaagaucauguucucuagaaggcaacccuguagccuguaucaauuuaucuuuuugucuaaaugccucggguaaacacguugcagauagcauaggauuuacuguagaauuacaauuagauuggcagaaacaaaaaggaggaguaaggagagcuuuauucuuagcaaguagacaagcaacucuaacacaaacccuuuuaauacaaaauggagccagagaagauuguagagaaaugaagauauauuuaaggaaugaaucugaauuuagggauaaacuuaguccaauacauauugccuuaaacuucucacuagauccacaagcucccguugauucucacgggcuucggccagcgcuacacuaccaaagcaaaagucgaauagaagauaaagcucaaauacuauuagacugcggagaagauaacauaugcguaccagaucugcaacucgaagucuuuggcgaacaaaaccaugucuaucugggagauaaaaacgcccuuaaucuaaccuuccaugcacaaaacgucggugaaggaggugcauaugaagcagaauugagagucaccgccccuccugaagcugaauauucaggucuaguacgacacccugguaauuucucaucacucuccugugacuauuuugcuguuaaucaaagucgucuauuaguuugugaucuaggaaaccccaugaaagcaggagcgagucuuugggguggguuaagauuuacaguaccucaucuucgagauacaaagaaaaccauccaauuugauuuucaaauacuaucuaaaaauuugaacaacucacagagugauguaguaucauucagacuauccguagaagcacaagcucaaguaacucuuaacggaguuucaaaaccagaagcaguauuauucccaguaucagauuggcauccaagagaccaaccucaaaaagaagaggauuugggcccagcaguacaucaugucuaugaacugaucaaccaaggcccuucuagcaucucccaaggcguacuagaacuuucuugcccacaagcacuagaaggacaacaauuacuauacguuacacgaguaacaggacucaauuguacaacuaaucaccccauaaauccaaaaggauuagaauuagauccggaaggaaguuuacaucaccaacagaaaagagaagcuccaaguagaucuuccgcaaguuccggcccucaaauauuaaaaugcccagaagcugaauguuucaggcuacguugugagcuaggaccauuacaucaacaagaaucacaaucuuuacaacugcacuuuagaguaugggcuaaaacuuucuuacaacgugaacaccaacccuuuuccuuacaaugcgaagccguuuauaaggcuuugaaaaugccuuauagaauuuuaccaaggcaacuaccccaaaaagaaagacaagucgccacugcgguucaguggaccaaagccgagggaucuuacggcgucccucuuuggauuauaauacuggccauuuuauucggacuucuuuuacuaggacuacuaauauauauuuuauauaaauuaggauuuuucaaaaggucacuuccuuacgguacagcuauggaaaaagcgcaacucaaaccaccagcaacuagcgacgcauaa

SEQ ID NO: 3768 - RNA, 2397 nt, Artificial Sequence
  AAH20057 variant
augaaucuacaaccaauauucuggauaggucuaauaucaucaguuuguuguguauuugcacaaacagaugaaaauagaugccugaaagcuaaugcaaaaucauguggagaauguauacaagcaggacccaacuguggaugguguacaaacaguacauuucuccaagaaggcaugccaacaucagcaagaugugaugacuuagaagcucuaaagaagaaagguugcccaccagaugauauagaaaacccaagaggaagcaaagacaucaagaaaaacaaaaacguuaccaacagaaguaaaggcacugccgaaaaauuaaaaccagaggauauaacacaaauacaaccacagcaauuaguucuaagacucagaucaggagagccacaaacauucacccuaaaauucaaaagagccgaagauuauccaauagaucuauauuauuuaauggauuuaagcuauagcaugaaagaugacuuagagaacguuaaaucucuaggaacagaccuaaugaaugaaaugagaaggauaacaucagauuuuagaauaggcuuuggaucauucguugagaaaacaguuaugccauauauaagcacuaccccugcgaaauuaagaaauccaugcacaagcgaacaaaauugcacuucacccuuuaguuauaaaaauguacuaucacuaacaaauaaaggugaaguauuuaaugagcuagugggaaaacaacgaauaucaggaaacuuagacaguccagaaggaggauucgaugcaauaaugcaagucgccguauguggaaguuuaauaggauggagaaaugucacuaggcuauuaguauuuucuacagacgcaggcuuucauuuugcuggggacgguaaauuaggaggaauuguacuaccaaacgauggacaaugccacuuagaaaauaauauguacacaaugucacauuauuacgauuauccaucgauagcgcaccuaguacaaaaacuaagugaaaauaauauacaaacaauauuugcuguuacugaagaauuucaaccaguguauaaagaacuaaagaacuuaauaccaaaaucagcugugggcacccuaucugcaaauuccagcaacguuauacaacuuauaauagacgcauauaauagccuuaguagugaaguaauauuagaaaacggaaaauuaagugaaggagucacaaucucauacaaaucuuacuguaaaaauggagucaaugguacaggcgaaaauggaaggaaauguagcaacauaaguaucggcgaugaaguacaauuugaaauaaguauaaccaguaauaaaugcccaaagaaagauagcgauucauuuaaaauaaggccucuuggguuuacugaagaaguagaaguaauauuacaauauauaugugaaugugaaugucaaucagaagguauuccagaaaguccgaaaugucaugaaggaaauggaaccuucgaauguggagcaugccguuguaaugaagguagaguuggucgacauugcgaauguucaacagaugaaguaaacucagaagacauggaugccuauugucgaaaagagaauaguagugaaauauguucuaauaauggagaauguguaugcggacaaugcguaugcaggaaaagagauaauacuaaugaaauauacagugggaaauuuugugaaugugauaauuucaauugcgauagaucuaauggauuaauaugugggggaaacgggguauguaaaugcaggguaugugaaugcaauccaaacuauacagguucagccugcgauuguucuuuagauacaagcacuugugaagcaucaaacggccaaauaugcaauggaagaggaauuugcgaaugcgguguauguaaaugcacagacccaaaauuucaaggacaaaccugugaaaugugucaaacaugcuuaggaguaugugcagaacacaaagaauguguacaaugcagagcauuuaauaaaggagaaaagaaagauacauguacucaagaauguucuuauuuuaauauaacaaaaguugaaaguagagacaaauuaccacaacccguacagccagauccaguaagucauuguaaagaaaaagacguagacgauugcugguuuuacuuuacguacucaguaaauggaaacaacgaaguaaugguucacgucgucgaaaauccagaauguccuacagguccagauauaauaccaaucguagcaggaguaguugcaggaauaguauuaaucggacuagcacuauuacugauauggaaauugcugaugauaauacacgauagaagagaauuugcuaaauucgaaaaagagaaaaugaaugcaaaaugggauacaggugaaaaucccaucuauaaaucagcgguaacaacuguaguaaauccaaaauacgaaggaaaauaa

SEQ ID NO: 3769 - RNA, 2367 nt, Artificial Sequence
  AAA36122 variant
augggaauagaauuacuauguuuauucuuucuuuuucuaggucguaaugaucacguacaaggcggaugugcguuaggaggagcugaaaccugugaagauugcuuacugauagguccucaaugugcuuggugugcacaagaaaauuucacacacccaucaggagucggagaacgaugcgauacaccagcaaauuuauuagcaaaaggaugucaacuaaacuucauugagaacccgguaucacaagucgaaauccuaaaaaacaaaccauuaucaguaggacgacaaaaaaacuccagcgauauaguacaaauagcgccgcaaucacugauuuugaaauuaagaccuggcggugcacaaacacuacaaguacacguaagacaaacugaagauuacccaguagaucuauauuaccuaauggauuuaucagcaucaauggaugaugauuuaaacacaauaaaagaauuagguucuagguuaucaaaagagaugucaaaacuaacuucuaauuuuagacuuggauuuggauccuucguagaaaaacccguaucaccauuugucaaaaccacaccagaggaaauagcaaauccuugcucuagcaucccuuacuuuuguuuaccaacauucggauucaaacauauauuaccauuaaccaaugaugcagaaagauucaaugaaauaguuaaaaaucaaaaaauaagugcaaauauagauacaccggaaggagguuuugaugcaauaaugcaagcagccgucugcaaagaaaaaaucggcuggagaaacgacucauuacaucuacuagucuuuguaucugaugcagacucccacuuuggaauggacucaaaacuagcaggaaucgucauuccaaaugacggauuaugccaccuagauucuaaaaaugaauauucuaugucaacaguauuagaauacccaacaauuggacaacuaauugacaaauugguucaaaauaauguuuuauuaauauuugccguaacucaagaacaaguacaucuauacgaaaacuaugcaaaauugauaccaggcgcaacaguuggacuacuucaaaaagauucaggaaacauacuacaacuaauuauaucagcuuacgaagaacuacgaucugaaguagaauuagaaguacuaggagacacagaaggguuaaaucuaucauucacugcaaucugcaauaaugguacauuauuucaacaucaaaaaaaauguucacauaugaaaguuggagauaccgcaucuuuuucuguuacaguaaacauuccacacugugaacgucgcuccagacauauaauaauaaaacccguaggucuaggagacgcguuagaacuguuggugaguccugaaugcaacugugacugccaaaaagagguagaaguuaacucaucuaaaugucaucaugguaauggaucauuucagugcggcguuugcgcaugucaccccggucauaugggcccaagaugugaauguggugaggacaugcuaaguacagauuccugcaaagaagcuccagaucauccauccuguucaggaagaggugauuguuauuguggacaaugcauaugccaccuaucaccuuauggaaauauuuauggaccuuauugucaaugugacaauuuuaguugugucaggcauaaaggccuacuauguggaggaaauggagauugugacuguggagaauguguauguagaucaggauggacaggcgaauauugcaauugcacuacuucaacagacagcuguguaucagaagauggaguauuaugcucaggaagaggagauuguguaugugguaaauguguauguacaaauccaggagcaucaggucccacuugugaaagauguccaacuuguggagauccuuguaacagcaaaagauccuguauugaaugucaucuaucagcagcuggacaagcaagagaagaauguguugauaaauguaaacucgcaggagcuacaauaucagaagaagaagacuucucaaaagaugguagcgucaguugcucuuuacaaggagaaaaugaaugccuaauaacauucuuaaucaccacagauaacgaaggaaaaacaauuauucauucaauaaaugaaaaagauuguccaaaaccaccgaacauacccaugauaaugcuaggaguaucuuuagcaaucuuauuaauaggaguaguuuuacuaugcauauggaaauuauuaguuuccuuucaugaccgcaaagaaguagcgaaauuugaagcagaaagaagcaaagcaaaauggcagaccgguacaaacccauuauaccgagguagcaccuccacuuuuaagaauguaacauauaaacaccgagaaaaacaaaaaguagacuuaaguacagauuguuaa

SEQ ID NO: 3770 - RNA, 786 nt, Artificial Sequence
  EAW71937 variant
augugggacuuaguauuaucaauugcacuaucaguaggauguacaggugcuguaccauuaauacaaucaagaauaguaggaggaugggaaugugaaaaacauucacaaccauggcaaguagccguauauagucauggaugggcacauuguggaggaguauuaguacauccacaauggguauuaacagccgcacauuguuuaaagaaaaauagccaaguaugguuaggaagacacaacuuauucgaaccagaagauacaggacaaagaguaccaguaagucauagcuuuccacauccauuauauaauaugucauuauuaaaacaucaaucacuaagaccagacgaagacaguucacacgaucuaaugcuauuaagauuaucagaaccagcaaaaauaacagauguaguaaaaguauuaggauuaccaacacaagaaccagcauuaggaacaacaugcuacgcaucaggauggggaucaauagaaccagaagaauuuuuaagaccaagaucuuuacaauguguaucauuacaucuauuaucaaaugacaugugugccagagcauauucagaaaaaguaacagaauuuauguuaugugcaggauuauggacaggaggaaaagacacaugcggaggagauucaggaggaccgcuaguauguaauggaguacuacaaggaauaacaucauggggcccagaaccaugugcacuaccagaaaaaccagcaguauacacaaaaguuguacauuauagaaaauggauaaaagacacaauagcagcaaauccauaa

SEQ ID NO: 3771 - RNA, 672 nt, Artificial Sequence
  EAW71938 variant
augugggacuuaguauuaucaauagcauuaaguguaggauguacaggagcaguacccuuaauacaaagcagaauaguaggaggaugggaaugcgaaaaacauucacaaccauggcaaguagcaguauacagucacggaugggcacacuguggaggaguuuuaguacauccacaauggguacuaacagcagcacacugucuaaaaaaaaauucacaaguaugguuaggaagacauaacuuauucgaaccagaagacaccggacaaagaguaccaguaagucauucauuuccacauccauuauacaauaugucacuauuaaaacaucaaagucuaagaccagaugaagauucaagucacgaucuaauguuauuaagauuaucagaaccagcaaaaauaacagacguaguaaaaguacuaggacuaccaacacaagaaccagcauuaggaacuacauguuaugcaucaggauggggaucaauagaaccagaagaauuuuuaagaccaagaucacuacaaugcguaucacuacacuuauuaagcaacgauaugugugcacgagcauauucagaaaaaguaacagaauucaugcuaugugcaggacuauggacaggaggaaaagacacaugcggaguaucacacccauacucacaacaccuagaaggcaaaggauaa

SEQ ID NO: 3772 - RNA, 189 nt, Artificial Sequence
  BAF98781 variant
augucacuauuaaaacaucaaucacuaagaccagaugaagacagcucacacgaucuaaugcuauuaagauuaagcgaaccagcaaaaauaacagauguaguaaaaguacuaggacuaccaacacaagaaccagcauuaggaacaacauguuacgcaagcggauggggaagcauagaaccagaagaauaa

SEQ ID NO: 3773 - RNA, 735 nt, Artificial Sequence
  BAG62239 variant
augggaacauuauggggauguccaggagcaccaccaguaggcgcacauucauguccacuaccaaaagaaguaucaagaacacuaggaucaggagaaggaauggccguaucacacagaaacaauaguggaauguuaccaccaggaagccuauuaagaaauucacaaguauggcuaggaagacauaauuuauuugaaccagaagacacaggaagaagaguacccgucagucauucuuuuccacauccauuauacaauaugaguuuauuaaaacaucaaagucuaagaccagaugaagauagcucacaugaucuaaugcuauuaagacuaagcgaaccagcaaaaauaacagauguaguaaaaguacuagguuuaccaacacaagaaccggcauuaggcacaaccuguuacgcaucuggauggggaaguauagaaccagaagaauuuuuaagaccaagaucacuacaaugcguaagccuacauuuacucucaaacgauaugugcgcaagagcauauucagaaaaaguaaccgaauuuaugcuaugcgcaggauuauggacaggaggaaaagacacauguggaggagauagcggaggaccauuaguaugcaauggaguauuacaaggaauaacaucauggggaccagaaccaugugcauuaccagaaaaaccagcaguauacacaaaaguaguacauuacagaaaauggauaaaagacacaauagcagcaaauccuuaa

SEQ ID NO: 3774 - RNA, 786 nt, Artificial Sequence
  AAA74454 variant
augugggaccuaguacuaucaauagcacuaucaguaggauguacaggagcaguaccauuaauacaaucaagaauaguaggaggaugggaaugugaaaaacauucacaaccauggcaaguagcaguauacagccauggaugggcacacuguggaggaguauuaguacauccucaauggguauuaacagcagcacauugucuaaaaaaaaauucacaaguauggcuaggaagacauaauuuauuugaaccagaagacacuggacaaagaguaccaguaucacauucauucccccauccauuauauaauaugucacuauuaaaacaucaaucauuaagacccgaugaagauucaucacaugacuuaaugcuauuaagauuaucagaaccagcaaaaauaacagacgucgucaaaguacucggauuaccaacccaagaaccagcacuaggcacaacauguuacgcaucaggauggggaaguauagaaccagaagaauucuuaagaccaagaaguuuacaauguguaucauuacauuuacuaucaaacgauaugugugcaagagcauauagugaaaaaguaacagaauucauguuaugugcaggacuauggacaggaggaaaagauacaugcggaggugauucaggaggaccauuaguaugcaacggaguacuacaaggaauaacaucauggggaccagaaccaugugcauuaccagaaaaaccugcaguauacacaaaaguaguacauuacagaaaauggauaaaagauacaauagcagcaaauccauaa

SEQ ID NO: 3775 - RNA, 150 nt, Artificial Sequence
  AAR10469 variant
augugggacuuaguauuaagcauagcauuaagcguaggauguacaggaauagcaagaucaggauggguaggaacaacaugcuuaagcuuaaaaacacaagcaagaggaagcuuaagcgcaacagcaagccauacaagaagcacaauauaa

SEQ ID NO: 3776 - RNA, 543 nt, Artificial Sequence
  AAR10468 variant
augugggaccuaguacuaagcauagcauuaagcguaggauguacaggagcaguaccacuaauacaaagcagaauaguaggaggaugggaaugcgaaaaacauagucaaccauggcaaguagcaguauacucacacggaugggcacacuguggaggaguauuaguacauccacaauggguacuaacagcagcacacugucuaaaaaaaaauucacaaguauggcuaggaagacauaacuuauucgaaccagaagacacaggccaaagaguaccaguaagccauaguuuuccacauccauuauacaauaugucacuacuaaaacaucaaucauuaagaccagaugaagauucaucacacgauuuaaugcuauuaagauuaucagaaccagcaaaaauaacagauguaguaaaaguacuaggacuaccaacacaagaaccagcauuaggaacaacauguuaugcaagcggauggggaagcauagaaccagaagaaugcacaccaggaccagauggaguagcaggaaguccagacgcauggguauaa

SEQ ID NO: 3777 - RNA, 765 nt, Artificial Sequence
  EAW71943 variant
auggcaacagcaggaaauccauggggcugguucuuaggauaucuaauauuaggaguagcaggaucauuaguaucaggaucauguucacaaauaauaaacggagaagauuguucaccacauucacaaccuuggcaagcagcauuaguaauggaaaaugaauuauucuguucaggaguacuuguacauccacaauggguauuaucagcagcucauuguuuucaaaauaguuauacaauaggauuaggacuacauucauuagaagcagaucaagaaccaggaucacaaaugguagaagcaucauuaucaguacgacacccagaauauaauagaccauuauuagcaaaugaccuaaugcuaauaaaauuagacgaaaguguaucagaaucagauacaauacgaucaauaucaauagcaagucaaugcccaacagcaggaaacucauguuuaguaucaggauggggauuauuagcaaauggaagaaugccaacaguauuacaauguguaaauguaagcguaguaucagaagaaguauguucaaaauuauaugaucccuuauaucauccaucaauguuuugugcaggaggaggacaagaucaaaaagauucauguaauggagauucaggaggaccauuaauauguaacggauauuuacaaggauuaguaucauuuggaaaagcuccauguggacaaguagguguaccaggaguauauacaaauuuauguaaauuuacugaauggauagaaaaaacaguacaagcuaguuaa

SEQ ID NO: 3778 - RNA, 228 nt, Artificial Sequence
  AAX30051 variant
auggcaacagcaggaaauccauggggaugguuuuuaggauauuuaauauuaggaguagcaggaaguuuaguaucaggaucauguucacaaauaauaaauggagaagauuguaguccacauucacaaccauggcaagcagcauuaguaauggaaaaugaauuauuuuguucaggaguauuaguacauccacaauggguauuaagugcagcacauuguuuucaaaaauaa

SEQ ID NO: 3779 - RNA, 588 nt, Artificial Sequence
  AAL14782 variant
auggcaacagcuggaaauccauggggaugguucuuaggauaucuaauacuaggaguagcaggaucauuaguaagcggaucauguucacaaauaauaaacggagaagauugcuccccacauucacaaccauggcaagcagcccuaguaauggaaaaugaauuauucuguucaggagucuuaguacauccacaauggguacuaucagcagcacacuguuuccaaaacucauacacaauaggacuaggacuacauucauuagaagcagaccaagaaccaggaucacaaaugguagaagcaucacuaucaguaagacacccagaauacaacagaccauuacuagcuaacgauuuaauguuaauaaaauuagacgaaucaguaucagaaucagauacaauaagaucaauaucaauagcaucacaaugcccaacagcaggaaauucaugucuaguaucaggauggggacuacuagcaaauggagaauuaacaggagucugcuuaccaucaagccgaagaucauccgcacaaucuagagguuuaacacaaucaucagcaucacaagcagaaugcuuaccauguuguuccgcauaa

SEQ ID NO: 3780 - RNA, 480 nt, Artificial Sequence
  AAL14781 variant
auggcaacagcaggaaauccauggggaugguuuuuaggauauuuaauauuaggaguagcaggaucauuaguaagcggaucauguucacaaauaauaaauggagaagauuguaguccacauucacaaccauggcaagcagcauuaguaauggaaaaugaauuauuuuguucaggaguauuaguacauccacaauggguacuaagugcagcacacuguuuucaaaauaguuauacuauaggacuaggauuacauucauuagaagcagaucaagaaccaggaagucaaaugguagaagcaaguuuaaguguaagacauccagaauauaauagaccauuauuagcaaaugauuuaauguuaauaaaauuagaugaaucaguaagugaaucagauacaauaagaaguauaaguauagcaucacaauguccaacagcaggaaauucauguuuaguaucaggauggggauuauuagcaaauggauaa

SEQ ID NO: 3781 - RNA, 765 nt, Artificial Sequence
  AAD21580 variant
auggcaacagcaggaaauccauggggaugguuuuuaggauauuuaauauuaggaguagcaggaucauuaguaucaggaucauguucacaaauaauaaacggagaagauuguucuccacauucacaaccauggcaagcagcauuaguaauggaaaaugaauuauuuuguaguggaguauuaguacauccacaauggguacuaucagcagcacacuguuuucaaaauuccuauacaauaggauuaggauuacauucauuagaagcagaucaagaaccaggaucacaaaugguagaagcaucauuaaguguaagacacccagaauauaauagaccacuauuagcaaacgacuuaauguuaauaaaauuagaugaaucaguaucagaaucagauacaauaagaucaauaucaauagcaucacaaugucccacagcaggaaauucauguuugguaaguggaugggguuuauuagcaaaugggagaaugccaacaguauuacaauguguaaauguaaguguaguaagugaagaaguaugcucaaaauuauaugauccauuauaucauccaagcauguuuugcgcaggagguggacaugaccaaaaagauucauguaauggagauucaggaggaccauuaauauguaaugguuaucuacaaggacuaguaucauuuggaaaagcaccauguggacaaguaggaguaccaggaguauauacaaaucuauguaaauuuacagaauggauagaaaaaacaguacaagcaucauaa

SEQ ID NO: 3782 - RNA, 2673 nt, Artificial Sequence
  AAC83230 variant
augucacaaggcauacuaucaccacccgcgggacuacuaagcgacgacgaugucguaguauccccaauguucgaaucaacggcagcagaucucggaucaguaguaagaaaaaaucuauuaucagauugcucuguaguaucaaccucauuagaagauaaacaacaaguaccaucagaagacagcauggaaaaagugaaaguauacuuacgagucagaccauuacuaccuucagaacuagaacgacaagaagaccaaggaugcguaaggauagaaaauguagaaacuuuaguacuacaagcuccaaaagauagcuucgcauuaaaauccaaugaacguggaauaggccaagcuacgcacagauuuacauuuucacaaauauucggaccggaagucggucaagccucauuuuuuaauuuaacaguaaaagaaaugguaaaagacguucucaaaggccaaaacugguuaauuuauaccuacggaguuacuaacuccgguaaaacacacaccauucagggcacuauaaaagacgguggaauccugccaagaagucuugcauuaauauucaauuccuuacaagggcaauuacauccgacaccugaucuaaagccauuacuaucaaaugaaguaauauggcucgacucaaaacaaauaagacaggaagaaaugaagaaacugagccuacuuaauggaggacuacaagaagaagaauuaagcacuucauuaaaacgcuccguauauauagaaaguagaauagguacaucaaccuccuuugacagcggaauagcaggacucucgucaaucagccaaugcacuuccucaagccaacuagaugaaacaucacaucgaugggcacaacccgacacagcaccuuuacccguaccagcuaacauucgauucuccauuuggauaucuuucuucgaaauauacaacgaacuguuauaugauuuacuagaaccuccaucucaacaaagaaaacgacaaacacuaagauuaugcgaagaccaaaacgguaaucccuacguaaaagaucuaaauuggauacacguacaagaugcagaagaagccuggaaacuacuaaaaguagggcgaaaaaaucaaucauucgccuccacacauuuaaaucaaaacucaagcagaucacacucaauauucucaauaaggauccuccaucuccaaggggagggugauauagucccaaaaauaagugagcuaagucuaugcgaucuugcagggagugaaagauguaaagaccagaagagcggagaaagauuaaaggaagccggaaauauuaauaccuccuuacacaccuuagguagauguauagcagcacuuagacagaaucagcaaaacagaagcaaacaaaacuuaguuccauuucgugauuccaaauuaacaagaguauuccaaggauuuuuuacaggaagaggacgaaguugcaugauagucaacguaaauccaugcgcuucaacauaugaugaaacuuuacauguugcuaaauuuuccgcaauagcaucucaacuaguucaugcaccucccaugcaauuaggguucccuucucuacauucauucauaaaagaacacagucuacaaguauccccuaguuuagaaaagggagcuaaagcugacaccgguuuagaugacgacauagaaaacgaagcagacauuucuauguauggaaaagaagaacugcugcaagucguggaagcaaugaaaacucuucuacuaaaagaaagacaagaaaaacuacaauuagaaaugcauuuaagagaugaaaucugcaaugaaaugguugaacaaaugcaacaaagagaacaaugguguucagaacaucuagauacacaaaaagaauuauuagaagaaauguacgaagaaaaauuaaauauccucaaagaaucauuaaccagcuuuuaccaagaggaaauacaagaacgcgaugaaaaaauagaagaauuggaagcgcuucuacaagaggcaagacaacaaucaguagcacaucaacaaucaggaagugaacuagcccuaagacggucacaaagacuagcagccagcgccucaacacagcaacuucaagaaguaaaagcgaaauuacaacaguguaaagcagaauugaauucgacaacagaagaacuacacaaauaucaaaaaauguuagaaccgccucccuccgccaaaccauucacuauagacguagacaaaaagcuagaagaaggacaaaaaaauaucagguuacuaagaacggaacuucaaaaauuaggagaaagccuccaaucagcagagagagcaugcugucauagcacaggagcaggaaaacuaaggcaagcguuaacaacaugcgacgauauucuaauaaaacaagaccaaacauuagcagaauuacaaaacaacaugguauuaguaaaacuugaccuaaggaaaaaagcagcauguauagcagaacaauaccacacuguauuaaaacuccaagggcaaguuucagcaaaaaaaagauuagggaccaaucaagagaaucaacaacccaaccaacaaccuccaggaaagaaaccauuucuaagaaacuuauuaccuagaacaccuaccugucagagcucaacagacugcaguccauaugccaggauccuaagaagccgacgaagcccacuauuaaaaucggguccguucggaaaaaaauauuaa

SEQ ID NO: 3783 - RNA, 1113 nt, Artificial Sequence
  AAH34621 variant
auggcaauaacauuagaagaagcaccauggcuaggauggcuccuaguaaaagcacuaaugagauucgcauucaugguaguaaacaaccucguagcuauaccaucauauauauguuacguaauaauucuacaaccacuaagaguacuagauucaaaaagauucugguauauagaaggaauaauguacaaauggcuauuaggaaugguagcgucauggggaugguacgccggauauaccguaauggaauggggcgaagauauaaaagcuguaaguaaagacgaagcaguaaugcucguaaaccaccaagcaaccggagauguauguacccuaaugaugugcuuacaagacaaaggauuaguaguagcacaaaugaugugguuaauggaucauaucuucaaauauacaaacuuuggaauaguuagccucguacauggagacuuuuuuauaagacaaggaagaucauaccgugaccaacaauuacuauuacuaaaaaaacacuuagaaaauaacuacagauccagagacagaaaauggauaguauuauucccugaaggaggauucuuaagaaaaagaagagaaacaucacaagcauucgccaaaaaaaauaaccuaccauuucuaacuaacguaacauuacccagaaguggagcaacaaaaauaauauuaaacgcacuagucgcacaacaaaaaaauggaucaccagcagguggagacgcaaaagaacuagauucaaaaucaaaaggacuacaauggauaauagauacaacaauagcauacccaaaagcugaaccaauagacauacaaacauggauacuaggauauagaaaaccaaccgucacacauguacauuacagaauauucccaaucaaagacguaccacuagaaacagacgaucuaacaacauggcuauaccaaagauucguagaaaaagaagaccuacuaucacacuucuaugaaacaggagcauuuccaccaucaaaaggccacaaagaagcaguaucaagagaaaugacacuaucaaauuuauggauauuccuaauacaaucauucgcauuccucuccggauacaugugguauaacauaauacaauacuucuaucacugccuauucuaa

SEQ ID NO: 3784 - RNA, 2178 nt, Artificial Sequence
  AAH14924 variant
auggcuauggacagcucuuuacaagccagauuauuuccaggauuagccauaaaaauacaacgaagcaacggauugauccacucagccaacguccgaacuguaaaucuagaaaaaucuugugucucaguagaaugggcagaaggaggagccacaaaaggaaaagagauagauuucgaugacgucgcagcaaucaauccggaauuacuacaauuauuaccuuuacaucccaaagacaauuuaccacuccaagaaaaugucacaauacaaaaacagaaaagaagaucaguaaacaguaaaauaccagcaccgaaagaaaguuuaagaucaagaucgacacgaaugucaacaguaagcgaacuaagaauaacagcacaagaaaacgacauggaggucgaacuaccagcggcagcaaauucuagaaaacaauuuagcguuccaccagcacccacgagaccaagcugcccugccguagccgaaaucccauuaaggaugguaucagaagaaauggaagaacaaguacacuccauaagaggcucgaguucugcaaacccaguaaacucaguacgaagaaagagcugucuuguuaaagaagucgagaaaaugaaaaacaaaagagaagaaaagaaagcccaaaacagcgaaaugagaaugaaaagagcacaagaauaugacagcagcuuucccaauugggaguucgcaagaaugauaaaagaauuucgagcaacacuagaaugucauccauuaacuaugacugauccaauagaagaacauagaauauguguaugcguacgaaaaagaccauugaauaaacaagaacuagccaagaaagaaauagacguaauaagcauuccaucaaaaugcuuauuacucgugcaugagccgaaauuaaagguagacuuaacgaaauaucucgaaaaccaagcauuuuguuucgauuuugccuucgacgaaacagccaguaaugaaguaguauauagauuuaccgcacgaccuuuaguucaaacaaucuuugaaggaggaaaagcaacaugcuuugcauauggccaaacgggaagcggaaagacccacacaauggguggggaccuaucaggaaaagcccaaaacgcaagcaaaggaauuuaugcgauggcaagcagggacgucuuuuuauuaaagaaucaaccaugcuacagaaaacuaggacuagaaguauauguuacauucuuugaaauauauaauggaaaauuauuugaccuauuaaacaagaaagcuaaauuacgagugcuagaagacggaaaacaacaaguacaaguugucgggcuacaagaacaucucgucaauagugcugaugacguuauaaaaaugauagacaugggaucagcauguagaaccagcggccaaacauuugcaaacucaaacucaagcaggucacaugcaugcuuccaaauaauacucagggcaaaaggaagaaugcauggaaaauuuucccuaguagaccuugcuggcaaugaaagaggugccgauaccucaucagcagauaggcaaacuagaauggaaggagcagaaauaaauaaaucauuacuugcacuaaaagaaugcauacgagcacuaggccaaaacaaagcacacacucccuuuagagaaucaaaauuaacucaaguauuaagagacuccuuuauaggagaaaauucacgaacauguaugauagcaaccauauccccaggaauaucuagcugugaauacacauugaauacacuaagauaugcagacagaguuaaagaauuaucaccacacucaggaccaucaggcgaacaacuaauacaaauggaaaccgaagaaauggaagccugcucaaacggagcauuaauacccggaaaccuaucaaaagaagaggaagaauuaaguucucaaaugucaaguuucaacgaagcaaugacacaaauuagggaacuggaagaaaaagcaauggaagaacuaaaagaaauaauccaacaagggccagauugguuggaacuuucagaaaugacagaacaacccgauuacgaccuagaaacauuuguaaacaaagcagaaagugcucuagcacaacaagcaaaacauuuuucagcacuaagagauguaauaaaagcacuaagacuugcaaugcaauuggaagaacaagcaucacgucaaauaucaagcaaaaagcgaccacaauaa

SEQ ID NO: 3785 - RNA, 342 nt, Artificial Sequence
  AAH62223 variant
augaacuucuaccuacuacuagcaucaucaauacuaugcgcacuaauaguauucuggaaauacagaagauuccaaagaaacacaggagaaaugucaucaaacucaacagcacucgcacuaguaagaccaucaucaucaggacuaauaaacucaaacacagacaacaaccuagcaguauacgaccuaucaagagacauacuaaacaacuucccacacucaauagcaagacaaaaaagaauacuaguaaaccuaucaaugguagaaaacaaacuaguagaacuagaacacacacuacuaucaaaaggauucagaggagcaucaccacacagaaaaucaaccuaa

SEQ ID NO: 3786 - RNA, 2583 nt, Artificial Sequence
  AAA56833 variant
augggcccauggggcuggaaauuaagauggacuguugcuuuauuacucgccgcugcgggaacugcagugggagaucggugugaaagaaaugaauuucaaugccaagaugguaaauguauaucguauaaauggguaugcgacggaucagcagaaugccaagacgguagugaugaaagucaagaaacuugcuuaucaguaacauguaaaucaggagacuuuucauguggaggaagaguaaaucgaugcauuccacaauuuuggagaugugacggacaaguugauugugauaauggaucagaugaacaaggauguccaccaaaaacauguucacaagaugaauuuagaugccaugacggaaaauguauaagccgccaguuuguuugcgauucagauagagauugucuugacggaucagaugaagcuaguugcccagugcuuacauguggaccagcaucauuucaaugcaauuccucaaccuguauaccacaauuaugggcaugugauaaugauccagacugcgaagacggaagugaugaauggccccaaagauguagaggcuuauacguauuccaaggagacucuaguccaugcucagcuuucgaauuucacugucuuaguggagaauguauucauucaagcuggagaugugauggaggaccagauuguaaagacaaaucugaugaagaaaauugugcagucgcaacaugucgaccagaugaauuucaauguagugaugguaauugcauacauggaucaagacaaugcgauagagaauacgauugcaaagauaugagugaugaaguaggaugugucaauguaacccuaugugagggaccaaacaaauuuaaaugucauaguggagaaugcauaacacuugauaaaguaugcaacauggcaagagacugcagagacuggucugacgaaccaauaaaagaauguggaacgaacgaaugcuuggauaauaauggcggauguucacacguauguaaugaucuaaaaaucggauaugaguguuuauguccagaugguuuucaauuagucgcacagagaagaugcgaagauaucgaugaaugccaagauccagauacguguucacaauuauguguaaaccuggaaggaggcuacaaaugucaaugugaagaaggauuucaauuagacccacauacuaaagcauguaaagcuguaggaagcauagcauauuuauucuuuacuaaucgacaugaaguaagaaaaaugacauuagauagaucagaauauacaucuuuaauaccuaauuuaagaaauguuguagcacuagauaccgaaguagcaucaaacagaauauauuggucagauuuaagucaaagaaugauaugcucaacucaacuugaucgagcacaugguguaucuucauaugacaccguaaucucaagagacauacaagcaccagauggcuuggcuguagacuggauacauucaaacauauacuggacagauucaguacuugguacaguaucaguagcagauacaaaagguguaaaaagaaaaacauuauuucgagaaaacgguucaaagcccagagcaauaguaguagacccuguacauggauuuauguauuggacagauuggggaacaccagcgaaaauaaagaaaggaggauuaaacggaguugauaucuacucacuuguaacagaaaauauucaguggccaaauggaauaacauuagaucuucugucagggagauuauacuggguagacagcaaauuacauucaauaucaucaaucgacguaaacggagguaauagaaaaacuauacucgaagacgaaaaacgacuggcacauccauuuucauuggcaguauucgaagauaaaguauuuuggacagauauaauuaaugaagcuauauuuucagccaauagauuaaccggaagcgauguuaaccuacuugcagaaaacuugcuaaguccagaagacaugguacuauuucauaaucuuacgcaaccucgagggguaaacuggugugaacgaacgacacuuaguaauggagguugucaauauuuaugccugccggcuccacaaauaaauccucacucaccaaaauuuacuugcgcaugucccgauggcauguuauuagcuagagauaugcgaaguugccugacagaagcagaagcugcaguagcaacccaagaaacguccaccgugagacucaaaguaucaaguacagcuguaagaacccaacacacgacaacaaggccaguaccggauacgaguagacuaccaggagcuacaccaggauuaacaacuguagaaauagucacaaugagucaccaagcauuaggcgaugucgcaggacgagguaaugaaaagaaacccuccaguguaagagcuuuaaguauaguauuaccaauuguuuuguuaguauuucuuugccuaggagucuuccuacuauggaaaaauuggagauugaaaaacauuaacaguaucaauuuugauaacccuguauaucagaaaacaaccgaagaugaaguucauauaugucauaaucaagauggauauaguuacccaaguaggcaaaugguaucuuuagaagaugauguagcauaa

SEQ ID NO: 3787 - RNA, 1302 nt, Artificial Sequence
  CAA70989 variant
augguauggaaaguagccguauuccuaucuguagcucuaggaauaggagcagucccaauagacgacccagaagacggaggcaaacacuggguaguaauaguagccgguucaaacggaugguacaacuauagacaccaagcagacgccugucacgcauaccaaauaauucacagaaacggaauaccagacgaacaaauaguaguaaugauguacgacgacauagcauacagugaagacaacccaacaccaggaauaguaauaaacagaccuaacggaacagauguauaucaaggaguaccaaaagacuauacaggagaagacguaacaccccaaaauuuccuagcaguauuaagaggagaugcagaagcaguaaaaggaauuggaucaggaaaaguacuaaaaucaggaccacaagaccauguauucauauacuuuacugaccacggaucaacaggaauauuaguauuucccaacgaagaucuacacguaaaagaccuaaacgaaacaauacacuacauguauaaacauaaaauguauagaaaaaugguauucuacauagaagcaugcgaaucaggaucaaugaugaaucaucuuccagacaacauaaacguauacgcuacaacagcagccaacccaagagaaucaucauacgcaugcuacuaugaugaaaaacgaucaacauaccuaggagauugguacucaguaaacuggauggaagacucagauguagaagaccucaccaaagaaaccuuacacaaacaauaccaccuaguaaaaagccacacaaacacaucacacguaaugcaauauggaaauaaaacaauuucaaccaugaaaguaaugcaauuccaaggaaugaaaagaaaagccucaucaccaguaccacuaccaccaguaacacacuuagauuuaacaccaucacccgauguaccacuuacaauaaugaaaagaaaacuaaugaacacuaacgaccuggaagaaucuagacaauuaacagaagaaauacaaagacaccuagacgcaagacaccuaauagaaaaaucaguaagaaaaauaguaucacuacuagcagcaucagaagcagaaguagaacaauuacuaucagaaagagcaccccucacaggacacucaugcuauccagaagcacuauuacacuucagaacucacugcuucaacuggcacagcccaacauacgaauaugcacuccgacauuuauauguauuaguaaaccuaugugaaaaaccauacccucuccacagaaucaaauuaucaauggaccauguaugccucggccacuacuaa

SEQ ID NO: 3788 - RNA, 1797 nt, Artificial Sequence
  AAL36991 variant
augacaccaauaguuacaguauuaauuugucuaggauuaucauuaggcccaagaacgcauguucaaacaggaacaauuccaaaaccuacucuaugggcagaaccugauucaguuauaacacagggaucaccaguuacauuaucaugucaaggcucacuagaagcucaagaauauagacuuuaccgcgaaaaaaaaagugcaaguuggauuacccgaauacgaccagaacuggucaaaaacggacaauuccauauaccaucuaucacaugggaacauacaggacgauaugguugucaauauuacucucgagcaagauggucagaacuaucagauccauuaguuuuaguaaugacaggcgcuuauccaaaaccuacacuuucagcacaacccaguccaguaguaacaaguggagguaggguuaccuuacaaugugaaagucaaguagcauuuggaggauuuauacuauguaaagaaggagaagaagaacauccacaaugccuaaauucccaaccccacgcaagagguucaucacgugcuauauuuucaguaggcccaguuucuccuaaucguagauggucacaccgaugcuauggauaugacuuaaacucaccauauguauggucaucaccaucagaucuacuugaacuauuaguaccagguguuucuaaaaaaccaucacuaucuguacaaccaggacccguaguugcuccaggagaaagcuuaaccuuacaaugugugucagauguaggauaugauagauuuguuuuauauaaagaaggagaaagagauuuacgacaacuucccggacgccaaccacaagcuggauuaucacaagcaaauuuuacauuaggaccuguuucaagaucauauggaggucaauauagauguuauggagcacauaaucuaucaucagaauguucugcaccaagugauccuuuagauauacuaauaacuggacaaauacgaggaacaccauucauaaguguacaaccuggcccaacaguggcaucaggagaaaauguuacacuauuaugccaaucauggagacaauuucacacuuuucuccucacaaaagccggugcggcagacgcuccacuucgucuaagaaguauacaugaauacccaaaauaccaagcugaauuuccaaugaguccagucacgucagcacacgcaggaacauacagaugcuacggaucauuaaauagcgaucccuaucuucuaagccauccaucagaaccauuagagcuaguuguaucuggaccaagcaugggaagcucaccaccaccuacuggucccauaucaacaccagcaggacccgaagaucaaccucuaacaccuacaggaucagacccucaaaguggauuaggaagacauuuaggcgucguuauagguauauuaguagcaguaguacuacuccuacuuuuauuacuacucuuauuuuuaauuuuaagacaccgaagacaaggaaaacauuggacauccacacaaagaaaagcagacuuucaacauccagcuggugcaguuggaccagaaccaacagauagaggccuacaauggagaucuucaccagcugccgacgcacaagaagaaaaucuuuaugcagcgguuaaagacacccaaccugaagacggaguagaaauggauacacgagcugcagcauccgaagcuccacaggauguaacguacgcacaauugcauucauuaacucuuagaagaaaagcaaccgaaccccccccaucucaagaacgagaacccccagccgaaccaagcauauaugcaacacuggcaauacauuaa

SEQ ID NO: 3789 - RNA, 498 nt, Artificial Sequence
  CCDS6385.2 variant
auggcacuauuagcauuacuauuaguaguagcauuaccaagaguauggacagaugcaaaucuaacagcaagacaaagagauccagaagauucacaaagaacagacgaaggagauaacagaguauggugccauguaugugaaagagaaaauacauuugaaugccaaaauccaagaagauguaaauggacagaaccauauugcguaauagcagcaguaaaaauauucccaagauuuuucaugguagcaaaacaaugcucagcaggaugcgcagcaauggaaagaccaaaaccagaagaaaaaagauuucuauuagaagaaccaaugccauuuuucuaccuaaaaugcuguaaaauaagauauugcaaccuagaaggaccaccaauaaacucaucaguauucaaagaauaugcaggaucaaugggagaaucauguggaggacuauggcuagcaauacuacuauuauuagcaucaauagcagcaggauuaucauuaucauaa

SEQ ID NO: 3790 - RNA, 375 nt, Artificial Sequence
  AAA68873 variant
augucacuagaacaaaaaucacaacacugcaaaccagaagaaggacuagacacacaagaagaagcacuaggacuaguaggaguacaagcagcaacaacagaagaacaagaagcaguauccagcucaucaccacuaguaccaggaacauuaggagaaguaccagcagcaggaucaccaggaccauuaaaaucaccacaaggagcaucagcaauaccaacagcaauagacuucacacuauggagacaaucaauaaaaggaucaucaaaccaagaagaagaaggaccaucaacaucaccagacccagaaucaguauucagagcagcacuaucaaaaaaaguagcagaccuaauacacuucuuacuacuaaaauacuaa

SEQ ID NO: 3791 - RNA, 957 nt, Artificial Sequence
  AAH02455 variant
auguuacuaggacaaaaaucacaaagauauaaagcagaagaaggacuacaagcacaaggagaagcaccaggacuaauggacguccaaauaccaacagcagaagaacaaaaagcagcaaguagcucaaguacacuaauaaugggaacauuagaagaagucacugacucaggauccccaucaccaccacaaucaccagaaggagcaagcucaucauuaacaguaacagauucaacacuauggagccaaagcgaugaaggaaguucaaguaaugaagaagaaggaccaucuacaucaccagauccagcacacuuagaaaguuuauuccgagaagcacuggacgaaaaaguagccgaauuaguaagauuucuauuaagaaaauaccaaauaaaagaaccagucacuaaagcagaaaugcuagaaagcguaaucaaaaacuauaaaaaucacuuuccagauauauuuagcaaagcaucagaauguaugcaaguaauauucggaauagauguaaaagaaguagacccagcaggacacucauacauauuagugacaugucuaggucuaucauacgauggacuacuaggagacgaccaaaguacaccaaaaacagguuuacuaauaauaguacuaggaaugauacuaauggaaggaagcagggcaccagaagaagcaauaugggaagcauuaaguguaaugggacuauaugacggacgagaacacucaguauauuggaaauuaagaaaauuacuaacacaagaauggguacaagaaaauuaucuagaauacagacaagcaccaggcagugauccaguaagauaugaauuucuauggggcccaagagcacuagcggaaacaagcuacguuaaaguauuagaacaugucguaagaguaaacgcgagagugagaauaaguuauccaucauuacaugaagaagcauuaggagaagaaaaaggaguguaa

SEQ ID NO: 3792 - RNA, 1290 nt, Artificial Sequence
  AAH04479 variant
auggaaacacaauucagaagaggcggacuaggauguaguccagccuccauaaaaagaaaaaaaaaaagagaagauaguggagauuuuggauuacaaguaaguacaauguuuucagaagacgauuuucaaucgacagaacgagcaccauauggaccucaacuacaauggagucaagaccuaccaagaguacaaguauuuagagaacaagcaaacuuagaagauagaucaccaagaagaacgcaaagaauaacuggaggagaacaaguacucuggggucccauaacacaaauauuuccaacaguaagaccagcugaucuaacaaggguaauaaugccauuagaacaaagaucacaacacugcaaaccagaagaaggacuacaagcacaagaagaagaccuagguuuaguaggcgcacaagcauuacaagccgaagaacaagaagcagcauuuuucagcucaacucuaaaugucggaacacuagaagaauuacccgccgcugaaucuccaagcccaccccaaucuccacaagaagaaagcuucaguccaacagcuauggacgcaauauucggaucacuaagugaugaagguagcggaagccaagaaaaagaaggcccaaguacaucacccgaccuaauagauccagaaucauucucacaagauaucuuacaugauaagauaauagauuuaguacaccuuuuguuaagaaaauacagaguaaaaggauuaauaacaaaagcugaaauguuaggaucaguaauaaaaaauuacgaagauuauuucccagaaauauucagagaagcaucuguauguaugcaauuauuauuuggaauugauguaaaagaaguagacccaacaagucauucauacguauuaguaacuucguuaaaccuaucauaugauggaauucaaugcaaugaacaaucaaugccaaaaucuggauuacuaauaauaguauuaggaguaauuuuuauggaaggaaacugcauaccagaagaagugaugugggaaguauuaucaauaaugggaguauaugcaggacgagaacauuuuuuauuuggagaaccaaaaagacuacuaacacaaaauuggguacaagaaaaauaccuaguauacagacaaguaccaggcacagauccagcuugcuaugaauuccuauggggaccgagagcacacgccgaaacaucaaaaaugaaaguauuagaauauaucgcaaacgccaacggaagagauccaacaucauaccccaguuuauaugaagacgcacuaagagaagaaggggaaggaguauaa

SEQ ID NO: 3793 - RNA, 1110 nt, Artificial Sequence
  EAW99421 variant
augccaagagcaccuaaaagacaacgauguaugcccgaagaagaucuacaaucccaaucagaaacucaaggucuugaaggagcucaagcaccacuagcuguagaagaagacgcaagcucaucaacaucaacaucaagcagcuucccaucuaguuuccccucaucaucaucaucaucauccucaucuugcuauccucuaauaccaucaacucccgaagaaguaucagcagaugaugaaacaccaaauccaccucaaucugcacaaauagcaugcucaucaccaaguguaguagccagucuucccuuagaucaaagcgacgaaggaucaucaagccaaaaagaagaaucaccaucaacauuacaaguccuacccgacucagaaucacucccacgaucagaaauagacgaaaaaguuacagaucuaguacaauuuuuauuauucaaauaccaaaugaaagaaccaauaacaaaagcagaaauauuagaaucaguaauuaaaaauuacgaagaucacuuuccauuauuauuuucagaagcaucagaaugcaugcuauuagucuucggaauagauguuaaagaaguagacccuacuggacauuccuuuguucuaguaacuucauuaggauuaaccuacgacggcaugcuaucagacguacaaucaaugccgaaaacaggaauacuaauacuaauacuaucaauaauauucauagaagguuauuguacuccagaagaaguaauaugggaagccuuaaacaugaugggacuauacgauggaauggaacacuuaauauacggugaaccaagaaaacuacuaacacaagauuggguacaagaaaacuaucuagaauacaggcaaguaccaggaucagaucccgcucgauacgaauuucuuuggggaccaagagcacacgcagaaauaagaaaaaugucauuauuaaaauucuuagcaaaaguaaacggaucagauccaagaucauuucccuuaugguacgaagaagcauuaaaagaugaagaagaaagagcacaagacagaauagcaaccacagacgauaccacugcaauggcaucagcaucaucaucggcaacaggaucauucucuuacccagaauag

SEQ ID NO: 3794 - RNA, 945 nt, Artificial Sequence
  AAH03408 variant
augccacuagaacaacgaucacaacacugcaaaccugaagaaggauuagaagcacaaggagaagcacuaggcuuaguaggagcucaagcaccugcaacagaagaacaagaaacagcuaguagcucaaguacauuagucgaaguaacacuaagagaaguaccagccgcagaaucaccaucaccaccacacagcccacaaggagcaucaacacucccaacaacaauaaacuacacacuauggucacaaagugacgaaggaagcucaaaugaagaacaagaaggacccucaacauuuccagaccuagaaacaucauuccaaguagcauuaagcagaaaaauggcagaauuaguacauuuccuacuacuaaaauacagagccagagaaccauuuacaaaagcagaaaugcuaggaucaguaauaagaaacuuccaagauuucuucccagucauauucucaaaagcaucagaauaccuacaacuaguauuugguauagaaguaguggaaguaguaagaauaggacauuuauacauauuaguaacaugccuaggacuaagcuacgacggucuauuaggagacaaccaaauaguccccaaaacaggacuuuuaauuauuguacuagcaaucauagcaaaagaaggagacugcgcaccagaagaaaaaauaugggaagaauuauccguacuagaagcauccgacggaagagaagauucaguauucgcacaucccagaaaacuacuaacucaagauuuaguacaagaaaacuacuuagaauauagacaaguaccaggaucagacccagcaugcuaugaauuccuauggggaccaagagcauuaguagaaacaucauacguaaaaguacuacaccacuuauuaaaaauaucaggcggaccacacauaucauauccaccauuacacgaaugggcauucagagaaggagaagaauaa

SEQ ID NO: 3795 - RNA, 930 nt, Artificial Sequence
  AAA03229 variant
augagucuagaacaaaggagcuuacacuguaaaccugaagaagcauuagaagcacaacaagaagcacuaggacuaguaugcguacaagcagccacaucaucaucaucaccacuaguauuaggaacauuagaagagguuccaacagcaggaucaacagacccaccacaaagcccacaaggugcaucagcauuuccuacaacaauaaacuuuacaagacaaagacaaccuagugaaggaaguucaucaagagaagaagagggaccuucaacaaguuguauauuagaaucacuauuuagagcaguaauaacaaaaaaaguugcagauuuaguaggauuucuauuacuaaaauacagagcaagagaaccaguaacaaaagcagaaaugcuagaaucaguaauaaaaaauuauaaacacugcuuuccagaaauauuuggaaaggcaucagaaucacuacaacuagucuucggaauagauguaaaagaagcugauccaacaggacauucauacguacuaguaacaugucuaggacuaaguuacgauggauuacuaggagacaaccaaauaaugccaaaaacgggauucuuaauaauaguacuaguuaugauagcaauggaaggaggacacgcaccagaagaagaaauaugggaagaacuaucaguaauggaaguauaugacggaagagaacacagcgcauauggagaacccagaaaacuucuaacacaagaucuaguacaagaaaaauauuuagaauacagacaaguaccagauucagauccagcuagauaugaauuccuauggggaccuagagcacuagcagaaacaaguuauguaaaaguacuagaauauguaauaaaaguaucagcaagaguaagauuuuucuuuccaagucuaagagaagcagcauuaagagaagaagaagaaggaguauaa

SEQ ID NO: 3796 - RNA, 945 nt, Artificial Sequence
  AAA17729 variant
augccacuagaacaaagaagccagcacuguaaaccagaagaaggacuagaagcaagaggagaagcacuaggauuaguuggagcucaagccccagccaccgaagaacaacaaacagcaagcagcucaucaacacuaguagaaguaacauuaggagaaguaccagcagcugacaguccaucaccaccacacucaccccaaggagcaucaucauucagcacaacaauaaauuacacucuauggagacaaucagaugaaggaucaagcaaccaagaagaagaaggcccaagaauguuuccagaucuagaaagcgaauuccaagcagcaauaucaagaaaaaugguagaauuaguacacuuccuacuacucaaauacagagcacgcgaaccaguaacaaaagcagaaauguuagaaucaguacuaagaaacugccaagacuuuuucccaguaauauuuucaaaagccucagaauaccuacaauuagucuuuggaauagaaguugucgaaguaguucccauaucacaccuauacauauuaguaacaugcuuaggccuaucauaugacggauuacuaggagauaaccaaguaaugccaaaaacaggacuacuaauaauaguauuagcaauaauagcaauagaaggcgauugugcaccagaagaaaaaauaugggaagaauuaagcauguuagaagucuucgaaggaagagaagacucuguauucgcacacccaagaaaacuauuaaugcaagauuuaguccaagaaaauuaccuagaauacagacaaguaccaggaucagacccagcauguuacgaauucuuauggggaccaagagcacuaauagaaacaucuuacguaaaaguauuacaucacacacuaaaaauuggaggagaaccacacauaucauacccaccucuacacgaaagagcucuaagagaaggagaagaauaa

SEQ ID NO: 3797 - RNA, 945 nt, Artificial Sequence
  AAA17446 variant
augccacuagaacaaagaucacaacacuguaaaccugaagaaggacuugaagcaagaggagaagcauuaggauuagugggagcacaagcaccugcuacagaagaacaagaagcagcaaguaguaguaguacacuaguagaaguuacauuaggagaaguaccugccgcugaaagcccagauccaccacaaaguccacaaggagccaguucacuaccaacaacaaugaauuauccacuauggagucaaaguuaugaagauaguagcaaucaagaagaagaagguccaaguacauuccccgauuuagaaagugaauuccaagcugcauuaagucgaaaaguagcugaacuaguacauuucuuauuacuaaaauauagagcaagagaaccaguaacaaaagcagaaauguuaggaucaguaguaggaaauuggcaguauuuuuuuccaguaauauuuucaaaagcaagcaguucauuacaauuaguauuuggaauagaauuaauggaaguagacccaauaggacaccuauauauauucgcaacauguuuaggacuaucauacgacggacuacuuggagauaaucaaauaaugccaaaagcaggacuauuaauaauaguacuagcaauaauagcuagagaaggagauugugcaccagaagaaaaaauaugggaagaacuaucaguauuagaaguauuugaaggaagagaagauucaauauuaggagacccaaaaaaacuauuaacacaacacuuuguacaagagaauuacuuagaauauagacaaguaccaggaagugacccagcauguuacgaauuuuuauggggaccaagagcacuaguugaaacuucauauguaaaaguacuacaucauaugguuaaaauaagcggaggaccacauauaaguuacccuccauuacacgaauggguauuaagagaaggagaagaauaa

SEQ ID NO: 3798 - RNA, 954 nt, Artificial Sequence
  EAW99410 variant
augaguagcgaacaaaaaagucaacauuguaaaccagaagagggaguagaagcacaagaagaagcacuuggacuuguaggagcacaagcaccuacgacagaagaacaagaagcagcuguaagcaguuccaguccuuuaguaccaggaacacuugaagaaguaccugcagcagaaucagccggaccaccacaaucaccacaaggagcaucagcauugccaacaacaauaaguuuuacaugcuggaggcaaccaaacgaaggaucaaguucacaagaagaagaaggaccaagcacaagcccagaugcagaaucacucuuuagagaagcauuaaguaauaaaguagacgaauuagcacacuuucuuuuaagaaaauauagagcaaaagaacucgucacgaaagcagaaauguuagaaagaguaauaaaaaacuauaaaagaugcuuuccaguaauauuuggaaaagcaucagaaucacuaaaaaugauauucggaauagauguuaaagaaguagacccagcuucaaacacauacacauuaguaacauguuuaggacuaagcuaugauggacugcuaggaaacaaucaaauauuuccaaaaacaggauuauuaauuauaguauuaggaacaauagcaauggaaggagauagcgcaucagaagaagaaauaugggaagaacuaggaguaaugggaguauaugacggaagagaacauacaguauauggagaaccaaggaaauuauuaacacaagauuggguacaagaaaauuaucuagaauacagacaaguaccaggaagcaauccagcgcgauaugaauuuuuauggggcccacgagcacuagcagaaacaagcuauguaaaaguucuagaacauguaguaagaguaaaugcaagaguaagaauagcauacccuucuuuaagagaagcagcauuguuagaagaagaggaaggaguauaa

SEQ ID NO: 3799 - RNA, 954 nt, Artificial Sequence
  AAA68871 variant
augucaagugaacagaaaagucaacacuguaaaccagaagaaggaguagaagcgcaagaagaagcauuaggucuaguaggagcgcaagcaccaacaacagaagaacaagaagcagcaguaagcucaaguucaccacugguaccgggaacauuagaagaagugccagcagcagaaagcgcaggaccaccacaaaguccacaaggagccucagcacuaccaacaacaauaaguuucacauguuggagacagcccaaugaaggaucaagcucacaggaagaagaaggaccgaguacaaguccagaugcagaaagccuauuuagagaagcauuaagcaauaaaguagacgaauuggcacauuuucuauuaagaaaauauagagcaaaagaauuaguaacaaaagcagaaaugcuagaacgaguaauuaaaaacuauaaaagaugcuuuccaguuauauuuggaaaagcaagugaaagucuaaaaaugauauuugggauagauguaaaagaaguagauccagcaagcaauacauauacacuuguaacaugucuaggauuaucguaugauggacuacuaggaaauaaucaaauauuuccaaaaacaggacuauuaauaauaguauuaggaacaauagcaauggaaggagauagugcaucggaagaagaaauaugggaagaauuaggaguaaugggaguauaugacggaagagaacacacaguauauggagaaccaagaaaauuauuaacacaagauuggguacaagaaaauuaucuugaauauagacaaguaccaggaaguaauccagccagguaugaauuuuuauggggaccaagggcauuagcagaaacaaguuauguaaaaguauuggaacauguuguaagaguaaaugcuagaguacgaauagcuuauccaagccuaagagaagcagcauuauuagaagaagaagaaggaguauaa

SEQ ID NO: 3800 - RNA, 954 nt, Artificial Sequence
  AAY27261 variant
augaguagugaacaaaaaucacaacacuguaaaccagaagaaggaguagaagcacaagaagaagcacuagguuuaguaggagcacaagcacccacgacagaagaacaagaagcagcagugagcucaagcucacccuuaguacccggcacgcuagaggaaguaccagcagcagaaagcgcaggaccaccacagaguccacaaggagcaucagcacuaccaacaacaauaagcuuuacuuguuggaggcaaccaaacgaaggaucaucaucacaagaagaagaaggaccaaguaccaguccagaugcagaaucauuauuuagagaagcacuaagcaauaaaguagaugaacuagcucauuuucucuuaagaaaauacagagcaaaagaauuaguaacaaaagcagaaaugcuagaaagaguaauaaaaaacuauaaaagaugcuuuccaguaauauuuggaaaagcaucagaaucacuaaaaaugauauucgggauagauguaaaagaaguagacccaacuaguaacacauauacuuuagugacaugucuaggauuaucauacgauggauuauuaggaaacaaucaaauauucccaaaaacaggacuacuaauaauaguacuaggaacaauagcaauggaaggagacucagcuucagaagaagaaauaugggaagaacuaggaguaaugggaguauaugacggaagagaacacacagucuauggcgaaccaagaaaauuacuaacacaagacuggguacaagaaaacuaucuagaauauagacaaguaccaggaucaaauccugcaagauaugaauuucuauggggaccacgagcacuagcagaaacaucauauguaaaaguauuagaacauguaguaagagugaacgcgagaguacgaauagcauauccaucucuaagagaagcagcauuacuagaagaagaagaaggaguauaa

SEQ ID NO: 3801 - RNA, 945 nt, Artificial Sequence
  BAF82126 variant
augccauuagaacaaagaucacaacacuguaaaccagaagaaggacuagaagcaagaggugaagcauuaggacuaguaggagcacaagcaccagcaacugaagaacaggaagcagcaucaucaucaucaacauuaguugaaguaacauuaggagaaguaccagcagcagaaucaccagauccaccacaaucaccacaaggagcaagcucauuaccaacuacaaugaauuacccacuauggucacaaucauaugaagauucaucaaaucaagaagaagaaggacccucuacuuuuccagaccuagaaucagaauuccaagcagcacuaucaagaaaacuagcaaaauuaguacauuucuuacuauuaaaauacagagcaagagaaccaguaacaaaagcagaaauguuaggaagcguaguaggaaauuggcaauacuuuuuuccaguaauauucucaaaagcaucagauucauuacaauuaguauucggaauagaacuaauggaaguagacccaauaggacauguauauauauuugcaaccugcuuaggauuaagcuaugacggacuuuuaggagauaaccaaauaaugccaaaaacuggauuucuaauaauaauauuagccauaauagcaaaagaaggagacugcgcaccagaagaaaaaauaugggaagaacugucaguauuagaaguauucgaaggaagagaagauauaauuuucggagacccuaaaaaauuauuaacacaauacuuuguacaagaaaauuauuuagaauauagacaaguaccaggaucugacccagcauguuacgaauucuuauggggaccaagagcauuaaucgaaacaaguuacguaaaaguacuacaccacaugguaaaaauaaguggcgguccccgaauaucuuacccucuauuacacgaaugggcauuaagagaaggugaagaauaa

SEQ ID NO: 3802 - RNA, 945 nt, Artificial Sequence
  AAA19006 variant
augccacuagaacaaagaucacaacauuguaaaccagaagaaggacuagaagcaagaggagaagcauuaggauuaguaggagcacaggcuccagcuacagaagaacaagaagcagcaucauccucauccacuuuaguagaagucacauuaggagaaguaccagcagcagaaucaccagacccaccacaaucaccccaaggcgccagcagccuaccaacaacaaugaauuacccucuauggagccaaucauaugaagacucaucaaaccaagaagaagaaggaccaucaacauuucccgauuuagaaucagaauuccaagcagcauuaucaagaaaaguagcaaaauuaguacauuucuuauuacuaaaauauagagcaagagaaccaguaacaaaagcugaaaugcuaggcaguguaguaggaaauuggcaauacuuuuucccaguaauauucucaaaagcaucagauagucuacaacuaguauuuggaauagaauuaauggaaguagaccccauaggacauguauauauauuugcaacaugcuuaggauuaucauaugacggauuauuaggagauaaccaaauaaugccaaaaacaggauucuuaauaauuauacuagcaauaauagcaaaagaaggagauugcgcacccgaagaaaaaauaugggaagaacuaaguguauuagaaguauucgaaggaagagaagacucaauuuucggagacccaaaaaaacuacuaacacaauauuuuguacaagaaaauuaccuagaauacagacaaguaccaggaucagauccagcaugcuacgaauucuuaugggguccaagagcauuaaucgaaacaucauauguaaaaguacuucaucauaugguaaaaauaucaggaggaccaagaauaucauacccacuucuacacgaaugggcacucagagaaggcgaagaauaa

SEQ ID NO: 3803 - RNA, 945 nt, Artificial Sequence
  CAG46567 variant
augccauuagaacaaagaagucaacacuguaaaccagaagaaggauuagaagcaagaggagaagcucuaggauuaguaggagcacaagcaccagcaacagaagaacaagaagcagcauccucaucaucaacacuaguagaaguaacauuaggagaaguaccagcagcagaaucaccugacccaccacaaaguccacaaggagcgucaucacuaccaacaacaaugaauuauccacuauggucacaaucauaugaagauucaaguaaccaagaagaagaaggaccaucaacauuuccagauuuagaaagcgaauuccaagcagcacuaaguagaaaaguagcaaaauuaguacauuucuuauuauuaaaauauagagcuagggaaccagucacaaaagcagaaauguuaggaagugucguaggaaauuggcaauacuuuuucccaguaauauuuucaaaagcuagugauucauuacaauuaguauuuggaauagaauuaauggaaguugauccaauaggacacgucuauauauuugcaacauguuuaggacuaucauaugacggacuacuaggagauaaccaaauaaugcccaaaacaggauuuuuaauaauaauacuagcaauaauagcaaaagaaggugauugcgcaccagaagaaaaaaucugggaagaacuaucaguauuagaaguauucgaaggaagagaagauucaauauucggagacccuaaaaaacuauuaacacaauacuuuguacaagaaaacuacuuagaauauagacaaguaccaggaagugacccagcauguuacgaauucuuauggggaccuagagcauuaauagaaacaucauacguaaaaguauuacaucauaugguaaaaauaucaggcggaccaagaauaaguuacccacuauuacaugaaugggcauucagagaaggagaagaauaa

SEQ ID NO: 3804 - RNA, 948 nt, Artificial Sequence
  AAA68877 variant
augucacuagaacaaagaagcccacacuguaaaccugaugaagacuuagaagcacaaggagaagauuuaggauuaaugggagcacaagaaccaaccggagaagaagaagaaacaacaucaucaucagauucaaaagaagaagaaguaucagcagcaggauccucaaguccaccacaaucaccacaaggaggagcaucaucaucaauaucaguauauuacacacuauggagccaauucgaugaaggaucaucaucacaagaagaagaagaaccaucaagcucaguagacccagcucaauuagaauuuauguuccaagaagccuuaaaauuaaaaguagcagagcuaguacacuuuuuauuacauaaauacagaguaaaagaaccaguaacaaaagcagaaaugcuagaaucaguaaucaaaaacuauaaaagauauuuuccaguaauauucggaaaagcaucagaauuuaugcagguaauauucggaacagauguaaaagaaguagacccagcugggcacucauacauauuaguaacagcacugggauuaucaugcgacucaauguuaggagauggacacucaaugccaaaagcugcauugcuaauaauagugcuaggaguaauauuaacaaaagauaauugcgcaccagaagaaguaauaugggaagcacuaagcguaauggguguauacgucggaaaagaacauauguuuuauggagaaccaagaaaauuacuaacacaagauuggguacaagaaaauuauuuagaauaccgacaaguacccgguucagauccagcccacuaugaauuucuauggggaucaaaagcucaugcagaaacaucauacgaaaaaguaauaaacuauuuaguaaugcuuaacgcaagagaaccuauaugcuauccaagucuauaugaagaaguacuaggagaagaacaagagggaguauaa

SEQ ID NO: 3805 - RNA, 1044 nt, Artificial Sequence
  AAI01309 variant
augccaagaggacaaaaaucaaaacuaagagcaagagaaaaacgaagacaagccagaggaggauuagaagacuuaauagacgcacucgauauauuagaagaagaagaagaaagcccaccaagcgcaucagcaugucuaaaagacguauuccaaaguucauuagacggcgccucaaacaauccucacggacuaagagaagcccaaagcacaucaacauccgccacagcagcaucacacacaagacacccagaagguguaaacgaccaaauggaagaaagacccauaugcacacaagaccuagaagcaacagauucauucccuagaggaccaguagacgaaaaaguaauaauacucguacauuaucuacuauacaaauaucaaaugaaagaaccaauaacaaaagcagacaugcuaaggaaugucacacaaaugucaaaaagccaauucccaguaauacuaucuagagcaucagaacaccuagaacuaauauuuggacuagaccuaaaagaaguagaaccaaacaaacacauauauguucuaguaaacaaacuagaucuaggaugugacgcaaaacuaagugaugaaacaggaguaccaaaaacaggcuuacuuaugacaguacuagggauaauauucacaaauggaaacugcgucgcagaagaagaaguauggaaaguauucaauacaaugggccuauacgacggaauagaacacuucauguuuggagaaccuagaaaacuauuaacaaaagacuuaguaaaagaaaacuacuuagaauaccaacaaguaccaaacucagacccaccaagauaccaauucuuauggggaccaagagcccaugcagaaacaucaaaaaugaaaguauuagaauuucuagcaaaaguaaaugacacagcaccaucagaguucucaaacugguauacugaagcacuacaagaugaagaagaaagagcacgagcaagaguugcagcaaaagcaagaguaagcgcaacagcaggagcaagaucaaaaguaaaaagcucaaaauccucacaacuacaauaa

SEQ ID NO: 3806 - RNA, 975 nt, Artificial Sequence
  CCDS43927.1 variant
augucccaagaccaagaaagcccaagaugcacacacgaucaacaccuacaaacauucucagaaacacaaucauuagaaguagcacaaguaucaaaagcauuagaaaaaacacuacuaucaucaucacacccccuaguccccggaaaacuaaaagaagccccagcagcaaaagcagaaucaccccuagaaguuccacaaucauuuuguucaucaucaauagcaguaacaacaacaucaucaucagaaucagacgaagcauccucaaaccaagaagaagaagacagcccaucaucaucagaagacacaagcgauccaagaaacguaccagcagacgcauuagaccaaaaagucgcauucuuagucaacuucaugcuacacaaaugccaaaugaaaaaaccuauaacaaaagcagacauguuaaaaauaauaauaaaagacgacgaaucucacuucucagaaauacuccuaagagcaucagaacacuuagaaaugauauuuggauuagacguaguagaaguagacccaacaacacacugcuacggacuauucauaaaacuaggauuaacauacgacggaaugcuaucaggagaaaaaggcgucccaaaaacaggauuauuaauaauaguauuaggaguaauuuucaugaaaggaaaccgagccacagaagaagaaguaugggaaguccuaaaccuaacaggagucuacucaggaaaaaaacacuucauuuucggagaaccacgaaugcuaauaacaaaagacuucguaaaagaaaaauaccuagaauaccaacaaguagcaaacucugacccagcaagauacgaauuccuauggggaccacgagccaaagcagaaacauccaaaaugaaaguauuagaauucguagcaaaaguacacggaucauacccacauucauucccuucacaauaugcagaagcacucaaagaagaagaagaaagagcacgagcgcgaauauaa

SEQ ID NO: 3807 - RNA, 1011 nt, Artificial Sequence
  CCDS59524.1 variant
augccaagaggacaagcaagcaaaagacgagccagagagaaaagaagacaagccagaggagaagaucaaugccuaggaggagcgcaagcaacagcugcagaaaaagaaaaacuaccaucaucaucaucaccagcaugccaaucaccaccacaaaguuuccccaaugcuggaauaccccaagaaagccaaagagcaagcuacccaaguucaccagcaucagcaguaagucuaacaucaucagaugaaggcgcaaaaggccaaaaaggagaaucaccaaacucuuuccacggaccaucaucaucagaauccacaggaagagaccuacuaaauacaaaaacuggagaauuaguacaauuucuauuaaacaaauacauaagaaaagaaccaauaacaagagaagcaauguuaaaaguaauaaauagaaaauacaaacaacacuuuccagaaauacuuaggagaucaacagaaaauguagaaguuguauucggucuauaccuaaaagaaauggacccaucaagacaaagcuauguauuaguaggaaaauuagauuuuccaaaucaaggaucauuaucagacggaggaggauuccccuuaagcggacuacuaaugguacugcuaagcaccauauucaugcacggaaacagagcaacagaagaagaaaugugggaaugccuaaacgcucuaggaauguauaaaggaagaaaacacuuuauauacggagaaccacaagaauuaguuacaaaagaccuagucagagaaggauaucuagaauaucaacaagucccaagcuccgacccaccuagauacgaauuucuauggggaccaagagccagagcagaaacaucaaaaaugaaaguacuagaauuuguagcaaaauuaaacgacacaguagcaaguacauacaaaucaagauacgaagaagcacuaagagaagaagaagaacaagcaagggcaagggcaguagcaagagacucagcaagagccagagcaagcagaucauuccaacccuga

SEQ ID NO: 3808 - RNA, 1044 nt, Artificial Sequence
  AAC23616 variant
augccaagaggucaaaaaucaaaacuaagagcaagagaaaaacgcagaaaagcaagagaagaaacucagggauuaaaagucagacacgcaacagcagcagaaaaagaagaauguccaucaagcucuccaguuuuaggagacacaccuacaucaucaccagcagcaggcauaccacaaaaaccacaaggagcaccaccuacaacaacagcagcagcagccguaucaugcacagaaucagacgaaggagcaaaaugccaaggagaagaaaacgcauccuucucacaagcaacaacaucaacagaaucaucagugaaagacccuguagcaugggaagcaggaaugcuaaugcauuucauccucagaaaauacaaaaugagagaacccauaaugaaagcagacaugcuaaaagucguagacgaaaaauacaaagaucacuucacagaaauauuaaacggagcaucaagaagauuagaauuaguauucggccuagaccuaaaagaagacaacccaucaucucacacauacacguuaguaucaaaacuaaaucuaaccaaugauggaaacuuaucaaaugacugggauuucccaagaaacggacuauuaaugccacuacuaggaguaauauuccucaaaggaaacucagcaacagaagaagaaauauggaaauucaugaacguacuaggagcauacgacggagaagaacaccuaauauacggagaaccaagaaaauuuaucacacaggaccuaguacaagaaaaauaccuaaaauacgaacaaguacccaacucagacccaccaagauaccaauuccuauggggaccaagagcauacgcagaaacaacaaaaaugaaaguacuagaguuccuugcaaaaaugaacggagcaacaccaagagacuuccccucacauuacgaagaagcauuaagagacgaagaagaaagagcccaaguaagaucaagcguaagagcaagaagaagaacaaccgcaaccacauucagagcaagaagcagagcaccauuuagcagaucaucacacccaauguaa

SEQ ID NO: 3809 - RNA, 960 nt, Artificial Sequence
  AAD10635 variant
augccaagaggacaaaaaucaaaauuaagagcaagagaaaaaagacgaaaagcaagagaugaaacaagaggacuaaacguaccacaaguaacagaagcagaagaagaagaagcaccaugcugcagcucaaguguaaguggaggagcagccucaaguucuccagcagccggaauaccacaagaaccgcaaagagcgccaacaaccgcagcagcagcagcagcaggaguauccagcacaaaaucaaaaaaaggagcaaaaucacaccaaggagaaaaaaaugcaucaagcucacaagcaaguacaagcacaaaaucaccaucagaagacccauuaacaagaaaaucaggaagccuaguacaauuccuacuauacaaauauaaaauaaaaaaaucaguaacaaaaggagaaauguuaaaaauaguaggaaaaagauuccgugaacacuucccagaaauacuaaaaaaagcaucagaaggacuaucagucguauucggacuagaauuaaacaaaguuaacccaaacggacacacauacacauucauagauaaaguagauuuaacagacgaagaaucauuauuaaguucuugggauuucccgagaaggaaacuacuaaugcccuuacuaggaguuauauuccuaaacggaaauucagcaacagaagaagaaauaugggaauuccuaaacauguuaggaguauaugauggggaagaacacucagucuuuggcgaaccauggaaacucauuacaaaagaccuaguacaagaaaaauauuuagaauacaaacaaguaccauccagcgacccaccaagauuucaauuucuuuggggaccaagagcauaugcagaaacgagcaaaaugaaaguauuagaauuuuuagcaaaaguaaauggaacaacaccaugugcauuuccaacgcacuaugaagaagcacuaaaagaugaagaaaaagcaggaguauga

SEQ ID NO: 3810 - RNA, 1041 nt, Artificial Sequence
  AAD10636 variant
augcccagaggacaaaaaagcacccuacacgcaagagaaaaaagacaacaaaccagaggacaaacccaagaccaucaaggagcccaaauaacagccaccaacaaaaaaaaaguaucauucucaaguccacuaauacuaggagcaacaauacaaaaaaaaagcgcaggaagaucacgaagcgcacuaaaaaaaccccaaagagcacuaucaacaacaacaagcguagacguaucauacaaaaaaucauacaaaggagcaaacucaaaaauagaaaaaaaacaauccuuuucacaaggcuuaagcucaacaguacaaucacgaacagauccacuaauaaugaaaacaaacaugcuaguacaauuccuaauggaaauguacaaaaugaaaaaaccaauaaugaaggccgacaugcuaaaaauaguacaaaaaucacauaaaaacugcuuccccgaaauccugaaaaaagcaucuuucaacauggaaguaguauucggaguagacuuaaaaaaaguagacucaaccaaagacucguacguacuaguaagcaaaauggaccuaccaaacaacggaacaguaacaagaggaagaggauucccaaaaacaggacuacuauuaaacuuacuaggaguaauauucaugaaaggaaacugugcaacagaagagaaaauaugggaauuccuaaacaaaaugcgaauauacgacggaaaaaaacacuucauauucggagaaccaagaaaacuaauaacacaagacuuaguaaaauuaaaauaccuagaauacagacaaguacccaacaguaacccagcaagauaugaauuccuauggggaccuagagcccaugccgaaacuucaaaaaugaaaguccuagaauucugggcaaaaguaaacaaaaccguaccaucagcauuccaauucugguaugaagaagcacuaagagacgaagaagaaagaguacaagccgcagcaaugcuaaaugacggaucaucagcaaugggaagaaaaugcucaaaagcaaaagccucauccagcagccaugcauaa

SEQ ID NO: 3811 - RNA, 1041 nt, Artificial Sequence
  AAC23619 variant
augcccagaggccaaaaaucaaaacuaagagcaagagaaaaacgacaaagaacaagaggacaaacacaagaccuaaaaguaggacaacccacagcagcagaaaaagaagaaaguccauccucaucaagcagcguacucagagacacagcaucaucaucacuagcuuucggaaucccacaagaaccacaaagagaaccaccaacaacaagugcagcagcagcaaugaguuguaccggaagugacaaaggugaugaaagucaagaugaagaaaaugcgaguagcucacaagccucaacaucaacugaaagaucacuaaaagacagcuuaaccagaaaaacaaaaaugcuaguccaauucuuacuauauaaauacaaaaugaaagaaccaacaacaaaagcagaaaugcuaaaaauaauaagcaagaaauacaaagaacacuucccagaaauauuuagaaaaguaucacaaagaaccgaauuaguauucggacuagcauuaaaagaaguaaacccuacaacacauaguuacauauuaguaagcaugcuaggaccaaacgacggcaaccaaucaucagcauggacauuaccaagaaacggacuauuaaugccacuacuuagcguaauauucuuaaaugguaauugcgccagagaagaagaaauaugggaauuucuaaacaugcuaggaauauacgacggaaaaagacacuuaauauucggagaaccacgaaaacuaauaacccaagaccuaguacaagaaaaauaucuagaauaccaacaaguaccaaacagcgacccaccaagauaccaauuucuauggggacccagagcacacgccgaaacaaguaaaaugaaaguauuagaauuucuagcaaaagucaacgauaccaccccaaacaauuucccauuacuauacgaagaagcauuaagagacgaagaagaaagagcaggagcacgacccagaguagcagcaagaagaggaacaacagcgaugacaagugcauacagcagagcaacaucaagcaguucaucacaaccaauguaa

SEQ ID NO: 3812 - RNA, 828 nt, Artificial Sequence
  CCDS65233.1 variant
augaccucagcaggaguauucaacgcaggcagcgacgaaagagcaaacucaagagacgaagaauacccaugcucaucagaaguaucaccaucaacagaaucaaguuguucaaacuucauaaacauaaaaguaggauuacuagaacaauuucuacuauacaaauucaaaaugaaacaaagaauucuaaaagaagacaugcuaaaaauaguaaacccaagauaccaaaaccaauucgcagaaauacaccgaagagccucagaacauauagaaguagucuucgcaguagaccuaaaagaaguaaacccaacaugccacuuauacgaccuaguaucaaaacuaaaacuaccaaacaacggaagaauacacguaggaaaaguacuaccaaaaacaggauuacuaaugacauuccuaguaguaauuuuccuaaaaggaaacugcgcaaacaaagaagacaccuggaaauuccuagacaugaugcaaauauacgacgguaaaaaauacuacauauacggagaaccaagaaaacuaauaacacaagauuucguaagacuaacauacuuagaauaccaccaaguaccaugcagcuauccagcacacuaccaauuccuauggggacccagagcauacacugaaacauccaaaaugaaaguacuagaauaccuagcaaaaguaaaugacauagcaccaggagcauucucaucccaauaugaagaagcacuacaagacgaagaagaaucacccucucaaagaugcucaagaaacuggcacuacugcucaggacaagacugccuaagagcaaaauucucaucauucucacaaccauacuaa

SEQ ID NO: 3813 - RNA, 1224 nt, Artificial Sequence
  AAH67286 variant
augccuagaggacauaaaaguaaacuuaggacaugugaaaaaagacaagaaacaaauggccaaccacaaggacuaacagggccacaagcaacagcagaaaaacaagaagaaucccacucaucaagcaguagcucaagagcaugcuuaggagauugcagaagaucauccgaugcaucaauaccacaagaaucacaaggaguaaguccaacaggaucaccugacgcaguaguuaguuacaguaaaucagauguagcagcaaaugggcaagacgaaaaaucaccaucaacaucacgagaugcaucaguaccacaagaaagucaaggagcaaguccaacaggcuccccagacgcaggaguaucaggaucaaaauacgauguagcagcaaauggucaagaugaaaaaaguccaagcaccagccacgacgucucaguuccacaagaaucccaaggcgcaagcccaaccggaagcccagacgcaggagucagcggaagcaaauacgauguagcagcagaaggagaagaugaagaaucuguaucagcaagucaaaaagcaauaauauuuaaacgucuaucaaaagacgcaguaaaaaaaaaagcaugcacacuagcacaauuucuccaaaaaaaauucgaaaaaaaggaaucaauacuaaaagcagauaugcuaaaaugcguaagacgagaauauaaacccuauuuuccacaaauacuuaauagaacaagucaacauuuaguaguagcauucggaguagaacuaaaagaaauggacucaagcggagaaucauauacauuaguaagcaaacuaggauuaccaucagaaggaauucucagcggagauaacgcacuucccaaauccggacuauuaaugucucuuuuaguaguaauauucaugaacggcaauugugcaacagaagaagaaguaugggaauuuuuaggauuacuuggaaucuaugacggaauuuuacauaguauauacggagaugcaagaaaaauaauaacugaagaucuaguucaagacaaauauguaguauacagacaaguaugcaauagugaucccccuugcuaugaauuucuauggggaccacgagcauacgcagaaacaacaaaaaugagaguauuaagagugcuagcagauagcagcaauacaucuccaggucuauauccacaccuauaugaagaugcacuuauagaugaaguugaacgagcauuaagauuaagagcauaa

SEQ ID NO: 3814 - RNA, 3429 nt, Artificial Sequence
  CCDS35417.1 variant
augggugacaaagauaugccuacugccggaaugccaucacuuuuacaaaguucuuccgaaucaccccaauccugcccagaaggugaagacucacaaucaccucuacaaauaccacagucuuccccagaaagcgaugauacauuauacccauuacaauccccgcaaucacguucugaaggugaggacagcuccgaucccuuacaaagaccgcccgaaggcaaagacucacaaucuccauuacaaauaccucaaucuucaccagaaggagaugacacacaaucucccuuacaaaauucgcaaucuuccccagaagggaaagauucccuaucccccuuagaaaucagccaguccccacccgaaggugaagauguacaaucuccacuacaaaacccugcauccuccuucuuuucuucagcuuuauuaucaaucuuccaaagcucucccgaaucaacucaauccccauuugaaggcuucccccaauccguucuccaaauaccaguuagcgccgcaucaucuuccacacuugucucuaucuuccaaucauccccagaaucuacacaauccccauuugaaggauucccccaaucaccauuacaaauaccgguaucacgaucuuuuuccucaacuuuauuaucaaucuuucagucaucucccgaacgcacacaaucuaccuucgaaggauucgcucaaucaccucuucaaauaccagucucaccgaguucuucaucuacucuuuuaagccuuuuccaauccuucuccgaaaggacucaaucaacauuugaagguuuugcucaauccucccugcaaaucccagucuccccuucuuuuucaucuacccuagucaguuuguuccaaucaucaccugaacgcacgcaauccaccuucgaaggcuucccgcaaagcccauuacaaaucccagucucauccucuucgucuucaacccuucucucgcuauuucaaucuucuccagaacgcacacacuccacauucgaagguuuuccucaaucccuucuacaaauacccaugacuucuuccuuuucauccacuuuacuuucaauauuucaaucaucaccagaaagcgcacaaucaacauucgaaggcuuuccccaaucaccccuccaaauaccaggaucacccagcuuuucaucuacacuccuuucauuauuccaaucaucaccggaacgaacucacucaacauucgaaggauuuccacaaucuccacuucaaauacccaugaccuccagcuucucuucaaccuugcucuccaucuuacaaucaucaccugaaagcgcccaauccgcauucgaaggauuuccacaauccccucuacagauaccuguauccucauccuuuucauauacgcuuuuaagccuguuccaaucuucgcccgagagaacccauucaacuuuugaaggguucccacaaucaccacuccaaauacccguuuccuccucaucauccuccucaacacuacuuagucucuuccaaucaagcccugaauguacucaauccacuuuugaaggauucccacaaucuccauuacaaauaccccaaucaccuccagaaggugaaaacacucacucaccuuuacagaucguaccuucacugccagaaugggaggauagccuaucaccucacuacuuuccacaaucaccaccacagggagaagacaguuuaucaccacauuacuuuccgcaaucuccaccccaaggagaggauucccuaucaccccauuauuucccccaauccccucaaggagaagauucucuaaguccacauuauuuuccacaaucaccuccacaaggcgaagauucuaugucuccacuguauuucccucaaucaccacuacaaggugaagaguuccaaucaucccuucaaucaccaguuagcaucugcucaucuuccacaccaagcucucuaccacaaucauuccccgaaagcucacaauccccucccgaaggaccuguccaaucaccauuacacucaccccaaucacccccagaaggaaugcacucucaaucaccuuuacaauccccagaaucagcaccugagggcgaagacucacuaucuccucuacaaauuccucaaagcccuuuagagggagaagacucguuaucgucauuacacuucccucaaucuccuccugaaugggaagacucucuauccccacuacacuuuccccaauucccaccucagggugaagauuuccaauccucucuacaaucgccaguaucaaucuguucaucaagcacuucacuaucuuuaccucaaucauuccccgagucuccucaaucgccaccugaaggucccgcccaaucuccacuacaacgaccaguauccagcuucuucucauauacccuagcuucacuauuacaaucgucccacgaaucaccacaaucuccaccugaagggcccgcucaaucuccacuacaaucacccguuucauccuuucccucuucaaccucauccucccuaagucaauccucaccaguuucaucuuucccaucuucuaccucaaguucacuaucaaaauccucuccagaaucuccauuacaaucucccgucauaucuuuuucauccucgacauccuuaucuccauucuccgaagaauccucaucacccgucgacgaguauacaucaucuuccgacacacuucuagaauccgauucccucacugauucagaauccuuaaucgaaucagaaccacucuuuacauacaccuuagacgaaaaaguagacgaauuagccagauuccuuuuauuaaaauaucaaguaaagcagccaauaacuaaagcagaaaugcucacuaauguaaucucacgcuauacuggcuacuucccagucaucuucagaaaagcuagagaguucauagaaauccucuucgguauuucuuuacgcgaaguugaccccgacgauucuuaugucuuuguuaauacccuagaccucacaucggaaggaugucuauccgacgaacaagggaugucacaaaaucgacuccuuauucuaauccuaucgauaaucuuuaucaaaggcacauaugccucagaagaaguaauaugggauguauuaucagggauuggaguucgagcagguagagaacacuuugccuucggagaaccacgagaauuguuaacaaaagucugggugcaagaacacuaccuugaauaccgcgaggucccuaacucuuccccucccagauacgaauuucucugggguccccgagcucauagugaaguuauaaagagaaaaguugucgaguuccuugccaugcucaaaaacacuguccccaucacauucccuuccuccuacaaagacgcauuaaaagauguggaagaaagagcccaagccaucaucgacacuacugaugacuccaccgcaaccgaaucagcuuccagcucuguaauguccccuucuuucucguccgaauag

SEQ ID NO: 3815 - RNA, 1122 nt, Artificial Sequence
  AAF07210 variant
augccaccaguaccaggaguaccauuuagaaauguagacaacgacucaccaaccucaguagaacuagaagacuggguagacgcacaacaucccacagaugaagaagaagaagaagccucaucagcaucuucaacuuuauaucuaguauucucaccaucuucauucucaacaucauccucauuaauauuaggaggaccagaagaagaagaaguaccaucaggaguaauaccaaaccuuacagaaucaauaccauccucaccaccacaagguccaccacaaggaccaucacaaucaccucuaucaagcugcugcucaucauuuucauggucuucauucagcgaagaaucaaguucacaaaaaggagaagauacaggcaccugucaaggacuacccgauucagaaucaucauucaccuauacacuagacgaaaaaguugcagaauuggucgaguuccuacuacucaaauacgaagcagaagaaccagucacagaagcagaaauguuaaugauaguaaucaaauauaaagauuacuucccaguaauucuaaaacgagcaagagaauucauggaauuauuauuuggauuagcauuaauugaaguaggcccagaucacuuuugcguauuugcaaacacaguagguuuaacagaugaaggaucugaugaugaagguaugcccgaaaacucauuacuaauaauaauuuuaucaguuauauucauaaaaggaaacugugccucagaagaagucaucugggaaguacuuaaugcaguaggaguauaugcaggaagagaacacuuuguauacggagaaccaagagaacuauuaacaaaaguauggguacaaggacauuaccuagaauaccgagaagucccacacuccucaccaccuuacuacgaauuccuauggggcccaagagcacacucagaaucaauaaaaaaaaaaguauuagaauuucuagcaaaacuaaacaacacaguaccaaguucauucccaagcugguauaaagacgcacuaaaagacguagaagaacgaguucaagcaacaauagacacugcagacgaugccacaguaauggcaucagaaucauuaucaguaaugucaucaaacguaucauucucagaauaa

SEQ ID NO: 3816 - RNA, 1932 nt, Artificial Sequence
  AAM08355 variant
augcuccuacccugccauuggguccuagaugcaacauuuucagauggaucauuaggucaauggguaaaaaauacaugugcaacuuaugcauuaucaccagucguucuuccaccacaaccacaaccucgaaaaaaagccacagauaaagauuacucagcauuucaucucggccaccuaagagaaguucgacuauuuuuaagagguggaaccucagaccaacgaauggacucacucguauuaugcccaacauauuuuaaacuguggagaacacuaaguggaucaccaggacuucaacuaagugaucuacacuuugguucccaaccagaaggaaaauuuucauuacgacgcgcaguaucugugaaacaaagagaagaaccucaagacuggccuuuaaacgaaaaaagaacacuauggaaagacucagauuuacccacuuggagaagaggaaccggauauaccuuaaguuuaccugccguaucuccuggcaaaagacuauggggagaaaaagcuggaucucuaccagaaagugaaccacuauucacauauacauuagaugaaaaaguugauaaauuaguacaauucuuauugcuaaaauaucaagcaaaagaaccucuaacaagagcagagaugcaaaugaacguaauuaauacauauacaggauacuuuccaaugauauuuagaaaagcaagagaauuuauagaaauauuauuuggaauuucauuaacagaaguagacccagaucauuucuacgucuuuguaaacacacuagaccuaacaugugaaggaucauugucagacgaacaaggaaugccacaaaaucgauuauuaauacuaauauuaucaguaauauuuauaaaaggaaauugcgccucagaagaaguaauaugggaaguccuaaacgccauaggaccauggucugcacuagcuggauucgccgauguucuuucuagauuagcauuaugggaaucagaaggaccagaagccuucugugaagaaagcgguuuaagauccgccgaagguucaguauuagaucuagcaaauccacaaggauuagcuggucauagacaagaagacggaagaagaggacuaacagaagcaagcccacaacaaaaaaaagguggagaggaugaagacaugccagccgccggaaugcccccacuuccacaaaguccaccugaaauaccgccgcaaggacccccaaaaauuucaccccaagguccaccucaaucuccaccacaaucaccacuagauucuugcucaucaccccuuuuauggacuagacuagaugaagaaucaucaagcgaagaggaggacacggcgaccuggcacgcauugccagaaucugaaucucuaccaagguaugcacucgacgaaaaaguagcugaacucguacaauuccuauuacuaaaauaccaaacaaaagaaccaguaaccaaagcagaaaugcucacuacaguaauuaaaaaauauaaagauuacuuuccaaugauauucggaaaagcucaugaauucauagaauuaauauucgguauugcucucacagacauggaucccgacaaucacucuuauuuuuucgaagauacuuuagaucucacauacgaaggaucucuaauagaugaccaaggaaugccaaaaaacugucuccuaauucucauauuaaguaugauauuuauaaaagguuccugcguaccagaagaagucaucugggaaguacuaucagccauaggaccuauucaacguccagcacgagaaguucuagaauuuuuaucaaaacucaguucaauaauaccuucugcuuuuccaucaugguauauggaugcccuuaaagauauggaagauagagcucaagcaauaauugacacaacugaugaugccacagcaauggcaucagcaucaccuucaguaaugagcaccaauuucuguccugaauaa

SEQ ID NO: 3817 - RNA, 2337 nt, Artificial Sequence
  AAG23757 variant
auggcacaaaaaauggauuguggcgcuggacuuuugggauuccaagcagaagcaucaguagaagauucagcauuacuaaugcaaaccuuaauggaagcaauacaaauaagugaggcaccaccgacaaaucaagcaaccgcagccgcaaguccucaaucaagucaaccuccaacagccaaugaaauggcagauauucaaguuucugcagcagcagcaagaccuaaaucagcguucaaaguccaaaacgcaaccacaaaaggaccaaauggcguauacgacuuuucgcaagcgcauaacgccaaagauguacccaauacccaaccuaaagcagcauuuaaaucacaaaaugccacgccaaaagggccaaacgccgcauaugacuuuucacaagcagcuacaacaggugaacucgcagcaaauaaaucagaaauggccuucaaagcucaaaaugcaacaacaaaaguaggcccaaacgcaaccuacaacuuuucacaaucacuuaacgcuaaugaucuagcaaacagccgaccuaaaacaccauuuaaagcguggaaugauacaacaaaagcaccaacugcagauacacaaacucaaaauguaaaucaagcaaaaauggcaacaagucaagcagacauagaaacagauccagggauuuccgaaccagacggggcaacagcacaaacaucugcugauggaucucaagcacaaaaccuagaaucacgaacaauuauaagaggaaaacguacacgaaaaauuaauaaucuuaauguagaagaaaauucuucaggugaccaaagacgagcaccacuagccgcaggaacauggcgaucugcacccguuccaguaacaacacaaaaccccccuggagcuccuccaaauguacuauggcaaacuccacuagccuggcaaaaccccuccggcuggcaaaaucaaacagcacgacaaacuccuccagcaagacaaagccccccugcacgacaaacuccuccagcauggcaaaauccuguugccuggcaaaauccugugauauggcccaacccaguaauauggcaaaauccaguuauauggccaaacccgauugucuggccaggcccaguaguauggccaaauccauuggcauggcaaaauccaccaggauggcaaacaccaccaggauggcaaacaccacccggcuggcaagguccucccgauuggcaaggcccuccugauuggccauuaccaccagauuggcccuuaccaccugauuggccauuaccuacagauuggccacuuccaccagauuggauccccgcugauuggccaaucccuccagauuggcaaaauuuacgucccuccccuaaucuucgaccuucaccaaacucaagagcaucacaaaaucccggugcugcacaacccagagacguugcauuacuacaagagcgagcuaauaaacucguaaaauaucuaaugcuaaaagauuacaccaaaguuccaauaaaacgaucagaaaugcuuagagauauaauaagagaauauacagauguauauccagaaauaauagaaagagccugcuuuguacucgaaaaaaaauucggaauacaauuaaaagaaauagauaaagaagaacaucuuuauauauuaauaaguacucccgaaagcuuagcagguauauuaggcacuacaaaagauacaccuaaacuaggacuuuuacuuguuauacuagguguaauauucaugaacggaaaucgcgccagcgaagcaguacuaugggaggcauuaaggaaaauggguuuaagaccaggaguuagacauccacuacugggugauuuacgaaaauuauuaacuuaugaauuuguaaaacaaaaauaucuugauuacagaagaguaccaaauucaaacccuccugaauaugaauuucuguggggauuaagaucauaucaugaaacgucuaaaaugaaaguacucagauucauagcagaaguacaaaaaagagacccuagagacuggacagcacaauucauggaagcagcugaugaagcauuagaugcacuagacgcagccgcagcggaagcagaagcaagagcagaagcacguacacgaaugggaauaggugaugaagcgguaucagguccuugguccugggaugauauagaauuugaauuacuuacuugggaugaagaaggagauuucggcgacccauggucacguauaccauucaccuuuugggcaagauaucaucaaaaugcacgcucacgguuuccucaaacauucgcugguccaauaauaggcccugguggaacagccucagcaaacuuugcagcaaauuucggggcaauugguuuuuuuuggguugaauaa

SEQ ID NO: 3818 - RNA, 1821 nt, Artificial Sequence
  AAD28598 variant
augucagauacuucagagucgggagcuggauuaacaagauuccaagcagaagcuagugaaaaagauucaucaaguaugaugcaaacuuuacuaacaguaacacaaaauguagaaguuccagaaacaccuaaagcaucaaaagcucuagaaguaagugaagaugucaaaguaaguaaagcaagcggagucaguaaggcaacugaaguaucaaaaacuccagaagcacgcgaagcaccugcaacgcaagccagcucuacuacacaacuaacugacacacaaguauuagccgcugaaaauaagaguuuagcagcagauacgaaaaaacaaaacgccgauccacaagcuguaacaaugccagcaacagaaacaaaaaaaguuucacauguugcagauacuaaaguaaauacaaaagcacaagaaacagaagcagcaccaucucaagcgccagccgaugaaccugaaccagaaagugccgcagcacaaucccaagaaaaucaagacacaagaccaaaaguaaaagccaaaaaagccagaaaagucaaacaccuugacggcgaagaagacggaagcagcgaccagucacaagcaaguggcacaacaggaggaagaagaguaucuaaagcacucauggcuucaauggcacgacgagcuagcagaggaccaauugcuuucugggcacgacgagcaagucgaacaagauuagcagcaugggcacgacgagcccucuuaaguuuaagaucaccuaaagcgagaagaggaaaagcuagaagaagggcagcaaaacuacaaucaagccaggaaccagaagcaccuccaccaagagauguagcacuguuacaaggaagagcaaaugacuuaguaaaauacuuacuagcgaaagaccaaaccaaaauaccaauuaaaagaucagacauguuaaaagauauaauaaaggaauauacugacguauauccugaaauaauagaaagagcuggcuacagccuagaaaaaguauuuggaauacaacuaaaagaaauugauaaaaaugaucauuuauauauacuguuaagcacacuagaaccaacagacgcuggaauauuaggcacaacuaaagacuccccaaaacuaggacuauuaaugguacuacuuucaauaaucuuuaugaauggcaacagaucauccgaagccguaauaugggaaguacuaagaaaauuaggucuaagaccuggaauacaucauagucuauuuggagacguaaaaaaacuaauaacugaugaauuuguaaaacaaaaauacuuagauuaugccagagucccaaacagcaauccaccagaauaugaauucuuuuggggauuacgaucauauuacgaaacgagcaaaaugaaaguacuaaaauuugccuguaaaguucaaaaaaaagauccaaaagaaugggcugcacaauauagagaagcaauggaagcagaccuaaaagcagcagccgaggcagcugcagaagcaaaagcaagagcagaaauaagagcaagaauggguauuggcuuagguucagaaaaugcagcaggaccauguaacugggaugaagcugauauaggaccaugggcaaaagcgagaauacaagcaggagcagaagcaaaagcaaaagcucaagaaagcggcucagcaucaacaggugcaucaaccagcacuaauaauucagcaagugcuagugcaucaacaagcggugguuuuucagcuggggcaagcuuaacagcuaccuuaacuuucggacuguucgcaggauuaggaggugccggagcaaguacaaguggaucaaguggugcauguggauuuucauauaaauaa

SEQ ID NO: 3819 - RNA, 2226 nt, Artificial Sequence
  AAH63838 variant
auggcagaagguaguuuuucuguacaaucugaaagcuauaguguagaagauauggaugagggaucagaugaaguaggagaagaagaaaugguagaagggaaugauuaugaagaauuuggagcauuuggaggauacggaaccuuaacaagcuuugauauucauauauuaagggcauuuggaagcuuaggcccuggacuaagaauuuuaucaaacgaaccaugggaauuagaaaauccaguccuagcccaaacauuaguugaagcguuacaauuggacccugaaacauuagcuaaugaaacagcagccagagcggcuaauguagcaagagccgcagcaucaaauagggcagcaagggcggcugcugcagccgccagaacagcauuuagucaagugguagccagccaucgaguagcaaccccccaaguaagcggugaagauacacagcccaccacuuaugcugcugaagcacaagguccaacaccagaaccaccuuuagccucuccgcaaacaagccaaauguuaguaacgucaaaaauggcagcacccgaagcaccagcuaccagugcacaaagccaaacagggaguccagcucaagaagcagcaacagaaggaccaucauccgcaugcgcauucagccaagcaccaugugcgagagagguagacgcuaauagaccuaguacugcauuuuuaggacaaaaugauguauucgauuuuacucaacccgcuggcguaaguggaauggcguuuccaagaccaaaacgaccggcaccugcacaagaagccgcaacagaaggaccaagcgcugcaagcggagucccacaaacaggcccaggaagagaaguagcugcaaccagaccaaaaacaacaaaaucaggaaaagcauuagcaaaaacuagauggguugaaccacaaaauguuguagcggcagcagcagcaaaagcaaaaauggcuacaucaauuccugaaccagaaggugcagcagcagcaacugcacaacacucugcagaacccugggcaagaaugggcggaaaaaggaccaaaaaaucaaaacaucuagaugaugaauacgaaucuagcgaagaagagcgagaaacaccugcugucccaccaacuuggagagcaucccagcccucauuaacuguaagagcacaauuagcgccuagaccaccaauggcacccagaagccaaauaccaucacgacacguacuuuguuugccuccucgaaacguuacuuuauuacaagaaagagcaaauaaguuaguuaaauacuuaaugauuaaagauuacaaaaaaauaccaauuaaaagagcagauauguuaaaagauguaauacgagaauaugaugaacauuuuccugaaauuauagaaagagcgacauacacacucgaaaaaaaauucggaauucacuuaaaagaaauagacaaagaggaacacuuauauauauuaguaugcacacgcgauagcucugcuaggcuacucggaaaaaccaaagauaccccuagacuaagccuacuucuaguuauuuuaggaguaauauuuaugaauggaaauagggcaagugaagcaguauuaugggaagcucucagaaaaaugggucuucgaccagguguacgacauccuuuuuuaggagaucuaagaaaacuaaucacagacgauuuuguaaaacaaaaauaucuugaauauaaaaaaauucccaacucaaauccaccagaguaugaauuucucuggggauuaagagcaagacaugaaacuucaaaaaugaggguacuacgauucauugcgcaaaaucaaaauagagauccaagagaauggaaagcucauuuuuuagaagcuguugaugacgcauucaaaacaauggaugucgacauggcugaagaacacgcucgagcacaaaugagagcucaaaugaacauaggugaugaagcucucauuggaagauggucaugggacgacauucaaguugaauuauuaacaugggaugaagacggagauuuuggagacgcaugggcuagaauaccauuugcuuuuugggcaagauaucaucaguacauuuugaauagcaauagagcaaauagaagggcaacuuggagagcuggaguaaguagcgguacuaauggaggagcaucuacuucaguauuggacgguccgucaacaagcagcacgauaagaacaagaaaugcagcaagagcaggagcuucauuuuucucuuggauacaacacagauaa

SEQ ID NO: 3820 - RNA, 1122 nt, Artificial Sequence
  CAG33449 variant
augccaccaguaccaggaguucccuuuagaaauguagauaacgauucaccaacaucagucgaacuagaagacuggguagaugcacaacacccaacugaugaagaagaagaagaagcaucaagugcaucaucaacauuauaucuaguguuuaguccaucuucauucucaacuagcucaucacuaauacuaggagguccagaagaagaagaaguaccaucaggagucauaccaaacuuaacagaaucaauaccaagcagcccaccacaaggcccaccacaaggaccaagccaaaguccacuaagcucauguuguaguaguuuuaguuggucaucauucagugaagaaucaucaagccaaaaaggagaagacacaggaacaugucaaggacuaccagauucugaaucaucauuuacauauacacuagacgaaaaaguagcagaauuaguagaauuccuauuacuaaaauacgaagcagaagaaccaguaacagaagccgaaauguuaaugaucguaauaaaauacaaagacuacuuuccuguaauacuaaaaagggcaagagaauucauggaauuauuauucggacuugcacuaauagaaguagguccagaccacuuuuguguauuugccaacacuguaggacuaacagaugaaggaagcgacgaugaaggaaugccugaaaauucauuauugauaauaauauuaaguguaauauucauuaaaggaaauugugcaucagaagaaguaauuugggaaguauuaaacgcaguaggaguauaugcaggaagagaacacuuuguauauggagaaccacgagaauuauuaacaaaaguauggguacaaggacauuaccuagaauauagagaaguaccacauucaucacccccauacuaugaauuucuuuggggaccuagagcucauucugaaaguauaaaaaaaaaaguauuagaauuccuagcaaaacuaaacaacacaguaccaucaucauuuccaucaugguacaaagacgcauuaaaagauguagaagaacgaguacaagcaacaauagacacagcugacgaugcaacaguaauggcaagcgaaucacuaucaguaaugucuagcaauguaucauuuucagacuaa

SEQ ID NO: 3821 - RNA, 2874 nt, Artificial Sequence
  AAM08354 variant
auguccuuagucucucaaaauucgcguagaagaagacguaggguagcaaaagcaacagcacacaauaguucauggggagaaaugcaagcgccaaaugcccccggacuaccagcagacguaccuggcagugauguaccacaaggcccaucagacucacaaauauuacaaggacuaugugcgagcgaaggcccaucuacuagcguucuaccaacaucggccgagggaccaaguacuuucguaccuccuacaauaucagaagcaucuucggcaucuggacaacccacuauaagugaaggcccuggcacuuccguacuuccaacuccaagcgagggauuaucuacaagcggaccaccaacaauaagcaaaggauuauguacuucaguaacuuuagcagcaagcgaagggagaaacacaucaagaccgccaacaagcucagaagaaccuuccacuucugucccaccuacugcaucagaaguacccucaacaucuuuacccccgacuccaggagaaggaacaaguacaagugugccaccuacagcuuaugaaggacccaguacaucaguaguaccgacacccgaugaaggaccauccacaaguguacuacccacaccaggagaaggaccaggaacaaguguaccauuagcagcaaccgagggcuuaucuacaaguguucaggcaacgccagacgaaggcccaaguacaagcguaccaccuacugcgacugaggguuuaucuacuccaguacccccaacaagagaugaaggcccuucaacuucaguuccagcaacaccgggagaaggaccaaguacaucaguacuuccagcagcaagcgauggucagucaauaaguuuagucccuacaaggggcaaaggaucaucaacuuccguaccaccuacagcuacugaaggauugucgacaucaguacaaccuacagcuggugaaggaucaucaacuucuguuccacccacaccaggaggaggucugagcacauccgugccuccuacugcuaccgaagaacuaagcacaagcguaccucccacaccaggugaagguccaaguacuagcguauuacccaucccaggugaaggauuaucgacaucugugccaccaacagcuuccgauggaucagacacgucuguuccaccaacaccaggcgaaggcgcaaguacauuaguacaaccaacggcuccugaugguccaggauccaguguccucccaaacccaggcgaaggcccgagcacccucuuuucuaguagcgcaucaguagaucgcaaccccaguaaaugcagucuaguguugccaagcccacgagugacaaaggcuuccgucgacucugauagcgaaggcccaaaaggcgcagaaggaccaaucgaauuugaagucuugagagauugugaaucuccaaauucaauaucuaucauggguuuaaacaccagucgugucgcaaucacauuaaaaccacaagauccaauggaacaaaacgucgcagaauuauuacaguuuuuacugguaaaagaccaaaguaaauauccuauaagagaaagcgaaaugagggaauacauuguaaaagaauacagaaaucaauucccagaaauacuccggcgagcugcugcccacuuagaauguaucuuucgcuuugaauuacgcgaacucgaccccgaagcucauacuuacauacuacuuaauaaauugggaccagucccauuugaaggauuagaagaaucaccuaauggucccaaaaugggacuauuaaugaugauuuuaggacaaauauuucuaaaugguaaucaagcaaaagaagccgagauaugggaaaugcucuggcggaugggaguacaaagagaaagaagauugaguauauuuggaaaccccaaaagauuauugucaguagaauuuguauggcaaagauaucuagauuaucgaccaguaacagauuguaaaccgguagaauaugaauuuuucuggggaccuagaucucaucucgaaacuacaaaaaugaaaauccuaaaauuuauggcuaaaauauauaacaaagacccuauggauuggccagaaaaauacaacgaagcguuggaagaagacgcugccagagcauucgcugagggauggcaagcacuaccucauuucaggcgcccauucuuugaagaagcagcggcugaaguaccaucaccagauucagaaguuagcucauauucaucaaaauaugcaccacacaguuggcccgaaucgagauuagaaagcaaagcaagaaaguugguucaacuauuucuauuaauggauucaacaaaacuacccauucccaagaaaggaauauuauauuacauaggaagggaauguucaaaagucuuuccagacuuauuaaacagagcugcuagaacuuuaaaucacguauacggaacagaacuuguaguguuagauccaagaaaccacaguuacacccuauauaaucgaagagaaauggaagaaacugaggaaauagucgauucuccaaacagacccgguaauaauuucuuaaugcaaguacugucauuuauuuuuauaauggguaaucaugcuagggaaucagcuguaugggcauucuuaagaggauuaggaguacaagcaggccgaaaacauguaauuacaugcagguaucuaucacaaagguacauugauucucuaagaguuccugauagcgacccaguucaauacgaguucguuuggggaccucgagccagguuagagacaucgaaaaugaaagcguuacgauacguagcaagaauacaccguaaagaaccccaagauuggccacaacaauacagagaagcgauggaagacgaagcaaaccgagcagaugugggacauagacaaaucuuuguccacaacuuuagauaa

SEQ ID NO: 3822 - RNA, 1572 nt, Artificial Sequence
  AAH93964 variant
augagucuaguuagccaaaaugcgagacauugcucagcagaaauaacagcagauuacggcgacggacgaggagagauacaagcaacaaacgcaucaggaaguccaacaucaauguuaguaguugaugcaccacaaugcccacaagcaccuauaaauagucaauguguuaauacuucacaagcagugcaagacccaaaugaccuagaaguacuaauagaugaacaauccagaagauuaggagcacuuagaguucacgaccccuuagaagauagaucaaucgcauuaguaaacuuuaugaggaugaaaucccaaacagaaggaucaauacaacaaucugaaauguuagaauuuuuaagagaauauucagaccaauucccagaaauauuacgacgugcaucagcacacuuagaucaaguauucggacuaaaucugagaguaaucgauccacaggcagauacauauaauuuaguaucaaaacgaggguuucaaauuaccgaucgaauagccgaaagccuagacaugccaaaagcaucccucuuagcccuaguacucggacauauauuacuaaauggaaauagagcaagagaagcaucaauaugggacuuacuauuaaaagucgacaugugggauaaaccgcaaagaauaaauaauuuauucgguaacacaagaaauuuauuaaccacagacuuuguauguaugagauuuuuagaauauuggccaguauauggaacaaauccucuagaguucgaguucuuauggggaaguagagcacauagagaaauaacaaaaauggaagcccuaaaauucguaucagacgcccaugacgaagaaccauggucuuggccagaagaauauaauaaagcucuagaaggcgacaaaacuaaagaaagaucacugacagcaggacuagaauuuuggagcgaagacacaaugaaugacaaagcaaaugaccuaguacaauuagcaaucagcgugacagaagaaauguuacccauacaccaagacgaacuauuagcacauacaggaaaagaauuugaagacguauuuccaaacauacuaaauagagcaacacuaauacuagacauguucuacggauuaaguuugauagaaguagacacaucagaacauauauacuuauuaguccaacaaccagaaucagaagaagaacagguaaugcucgaaagccuaggaagaccgacacaagaauacguaaugccaauucuaggacuaauauucuuaaugggaaacagaguaaaagaggcaaacguauggaaucuauuaagacgauuuaguguagacguaggaagaaaacauaguaucaccagaaaauuaaugcgucaaagauacuuagaauguagaccuuuaagcuacucuaauccugucgaauacgaacucuuaugggguccuagagcacaucacgaaaccauaaaaaugaaaguacuagaguauauggcaagacuauaucgaaaaagaccacaaaacuggccugaacaauacagagaagcaguagaagacgaagaagcaagagcaaaaucagaagcaacaauaauguuuuucuuagauccaaccuag

SEQ ID NO: 3823 - RNA, 924 nt, Artificial Sequence
  CCDS3269.1 variant
auguuacaaacaccagaaucaagaggucuaccuguaccacaagccgaaggagaaaaagauggaggacacgauggagaaacaagagcaccgacagcaagucaagaaagaccuaaagaagaacuaggagcaggaagagaagaaggggcagcagaaccugcauuaacuagaaaaggagcaagggcuuuagcugcaaaggcauuagcaagaagaagggcauauagaagauuaaauagaacaguagcagaacuaguacaauuuuuauuagucaaagauaaaaaaaaaucuccaauaacuagaagugaaaugguaaaauauguaauaggagaucuaaaaauauuguucccugacauaauagcaagagcagcagaacauuuaagguauguauuuggauucgaauuaaaacaauuugauagaaaacaucauacauauauacuaauaaauaaauuaaaaccauuagaagaggaagaagaagaagaccuaggcggggauggaccaagauuaggauuauuaaugaugauauuaggacuaauauauaugagaggaaauagugcaagagaagcacaaguaugggaaaugcuaagaagacuaggaguacaacccaguaaauaucauuuuuuauucggauauccaaaaagauuaauuauggaagauuuuguacaacaaagauaucuaaguuauagaagaguaccacacacaaauccaccagaauacgaauuuucauggggaccaaggucaaaucuagaaauaaguaaaauggaaguauuaggauuuguagcaaaauuacauaaaaaagaaccgcaacacuggccaguacaauauagagaagcauuagcagaugaagcagauagagcgcgagcaaaagcaagagcagaagcaaguaugcgagcaagagcaucugcacgugcgggaauacauuuaugguaa

SEQ ID NO: 3824 - RNA, 660 nt, Artificial Sequence
  AAD31314 variant
augccaagaggaagaaaaucaagaagaagaaggaaugcaagagcagcagaagaaaauagaaauaacagaaaaauacaagcaagcgaagcaucagaaacgccaauggcagcaagcguaguagcaagcacaccagaagacgauuuaucaggaccagaagaagacccaagcacaccagaagaagcaaguacaacaccagaagaagcaucaaguacagcacaagcacaaaaaccaagcguaccaagaagcaauuuccaaggaacaaaaaaaagccuacuaaugagcauacuagcacuaauauucauaaugggaaacagugccaaagaagcauuaguguggaaaguauuaggaaaauuaggaaugcaaccaggaagacaacauucaauauucggagaucccaaaaaaauaguaacagaagaauucguaagaagaggauaucuaauauacaaaccaguaccaagaagcaguccaguagaauaugaauuuuuuuggggaccaagagcacacguagaaaguaguaaauuaaaaguaaugcacuuuguagcacgagugagaaauagauguaguaaagacuggccauguaacuaugacugggauucagacgaugacgcagaaguagaagcaauuuuaaauaguggagcaagaggauacucagcaccauaa

SEQ ID NO: 3825 - RNA, 3750 nt, Artificial Sequence
  CCDS73700.1 variant
augagccaauuaagcaaaaauuuaggugauucaucaccuccugcagaagcccccaaaccacccguguacucucgaccuacaguucuuaugagagcacccccagccucuucaagagccccacccguuccuugggacccacccccgauugacuuacaagcuagcuuagcagcuuggcaagcuccacaaccugcuugggaagcuccccaaggacaacuaccugccccgguaguaccaaugacucaaccaccagcucucggagguccgauuguacccgcuccaccccuagguggacccaugggaaaaccaccuacacccgguguuuuaaugguucauccaccaccucccggcgccccaauggcacaaccucccacucccggcguacuaaugguucauccaucagccccuggcgcacccauggcacauccuccuccucccgguacaccaaugucacacccgcccccuccgggaacuccuauggcacauccucccccuccaggaacaccaauggcgcauccaccuccuccggggacgccuauggugcauccacccccuccuggaacuccuauggcacacccuccaccacccggcacaccaauggcacaucccccaccuccagguacaccaauggcucauccaccuccaccaggaacgcccauggcacaucccccacccccaggaaccccaauggcucaaccucccgcccccggaguacucauggcgcaaccacugacaccuggagucuuaaugguacaaccagcagcuccuggggcacccaugguacaaccacccccugcagcaaugaugacacaaccacaaccuucgggcgcgccaauggcaaaaccaccaggucccggaguucuuaugauccacccgccuggagcaagagcacccaugacacaaccgcccgcaucgggcgcccccauggcucaaccagccgcgccaccagcccaaccaauggcaccacccgcacaacccauggccucaugggccccacaggcacaaccucuaauuuuacaaauucaaucacaagucauaagagcuccuccucaaguaccgcaagggccucaagcuccuccggcccagcuagcaaccccucccggauggcaagcaacuuccccaggguggcaagcaacucaacaagguuggcaagcaacaccacugacauggcaaacaacacaaguaacuuggcaagcacccgcuguaacauggcaagucccuccaccaaugaggcaaggaccaccaccuauaagaccugguccaccucccauuagacccgggcccccaccagucagacaagcuccuccucuuaucagacaagcuccucccguaauaagacaagcgcccccuguuauaagacaagcaccaccuguuauccgccaagcuccagccguaauuagacaagcaccuccugucauucgucaagcaccacccguuauacgacaagcaccacccguaauacgacaggcuccaccacuaauaagacaagcucccccuccuauucgccccgcuccacaaguauuagcuacacaaccaccauuauggcaggcuuuaccaccuccaccaccacuacgucaagcaccacaagcuagguuaccagccccacaaguccaagcagcaccacaaguuccaacugcucccccagcgacacaaguaccggcagcacccccugcaggaccacaagucccccaaccuguauuacccgccccgcugucugcuccucuaucagcuccccaggcuguucauuguccaucuauaaucuggcaagcacccaaaggccaaccaccagucccacacgaaauaccuacuucaauggaguuccaagaaguccaacaaacacaagcacuagcauggcaagcacaaaaagcuccuacacauauuuggcaaccgcuaccugcacaagaagcacaacgacaagcaccaccauuaguacaacucgaacaacccuuccaaggagccccuccaucacaaaaagccguacaaauucaacucccaccacaacaagcacaagcauccggcccacaggcagaaguacccacacuaccccuccaaccuucauggcaagcaccuccagccguucuccaagcacaaccaggaccaccaguagcugcagcuaauuuucccuuaggauccgcuaaaaguuuaaugacaccgucuggugaaugcagagccucuuccauagaucgccgcgggucuagcaaagaacgaagaacauccucuaaagaaagacgagccccuaguaaagaucgaaugauauucgcggcaaccuucugcgcaccuaaagcaguaagcgccgcaagagcacauuuaccugccgcauggaaaaauuuaccugcaaccccggaaacauuugcaccgucauccuccguauuuccagcaacaucccaauuccaaccagcuucucuuaaugcauuuaaaggacccuccgccgccucggaaaccccuaaaucucuuccuuacgcacuucaagacccauuugcauguguagaagcauuaccagcaguacccuggguaccccaaccuaacaugaacgcaucuaaagccucacaagcaguaccaacuuuucuaauggcaacagcagcugcuccacaagcuacagcuaccacacaagaggccucaaaaacaucggucgaaccacccaggagaucaggaaaagcaacucguaaaaagaaacaucuagaagcacaagaagauucuagaggacauacccuagcauuccacgauuggcaaggacccagaccaugggaaaauuuaaaccucucagacugggaaguacaaaguccaauccaaguaaguggcgauugggaacauccaaacacaccaagaggauugucaggcugggaagguccaucaacauccagaauacuaucuggcugggaaggacccagugcaucaugggcuuuaagcgcaugggaaggaccuucgacaucacgagcucuaggcuuaucagaaucaccuggaucaucccuaccagugguaguuucagagguagccuccguuucuccagguuccucagcaacacaagauaauuccaaaguagaagcacaaccuuuaucaccuuuggacgaaagggcgaaugcauuaguucaauuccuccuugucaaagaucaagcuaaaguaccaguacaacguucggaaaugguaaaaguuauucuaagagaauauaaagaugagugcuuagauauuauuaacagagcaaauaauaaacucgaaugugcauuuggcuaccagcuaaaagaaauugacacuaaaaaccaugcguauauuauuauaaacaaauuagguuaccauacaggaaauuugguagcuucuuaccuugacagaccuaaauucgguuuacuaaugguaguauuaucccucaucuucaugaaaggaaauugcguacgcgaagaccucauuuuuaacuuucuauucaaauuggguuuggacguacgcgaaacaaacggucuuuuugguaacacuaagaaacugauaacagaaguuuuuguaagacaaaaauauuuagaauauaggcggauuccuuauacagaaccagcagaauacgaauuucuuuggggacccagagcauuuuuagaaacauccaaaaugcucgucuuaagguuucuagccaaacuacauaagaaagacccacaaucauggccuuuccacuaccuagaagcacucgcggaaugugaaugggaagacaccgaugaagacgaaccagacacaggcgacagcgcacacgguccuaccucucgaccucccccucguuaa

SEQ ID NO: 3826 - RNA, 282 nt, Artificial Sequence
  AAC39608 variant
augaaacuacuaaugguacuaaugcuagcagcacuaucacaacacugcuacgcaggaucaggaugcccacuacuagaaaacguaauaucaaaaacaauaaacccacaaguaucaaaaacagaauacaaagaacuacuacaagaauucauagacgacaacgcaacaacaaacgcaauagacgaacuaaaagaaugcuuccuaaaccaaacagacgaaacacuaucaaacguagaaguauucaugcaacuaauauacgacucaucacuaugcgaccuauucuaa

SEQ ID NO: 3827 - RNA, 363 nt, Artificial Sequence
  AAH67220 variant
augaaacuauuaaugguacuaaugcuagcagcacuaucacaacacugcuacgcaggaucaggaugcccacuacuagaaaacguaauaucaaaaacaauaaacccacaaguaucaaaaacagaauacaaagaacuacuacaagaauucauagacgacaacgcaacaacaaacgcaauagacgaacuaaaagaaugcuuccuaaaccaaacagacgaaacacuaucaaacguagaaguauucaugguaauaucauucucaucauacaaauuauucaaaucaccagaccaaggacaaguaggaucaucauuccuaacagacaacgcaaaagcaacaucagaacaagcauucucauacauaggauaa

SEQ ID NO: 3828 - RNA, 357 nt, Artificial Sequence
  AAA19238 variant
augccaagagaagacgcacacuucauauacggauacccaaaaaaaggacacggacacucauacacaacagcagaagaagcagcaggaauaggaauacuaacaguaauacuaggaguacuauuacuaauaggaugcugguacugcagaagaagaaacggauacagagcacuaauggacaaaucacuacacguaggaacacaaugcgcacuaacaagaagaugcccacaagaaggauucgaccacagagacucaaaaguaucacuacaagaaaaaaacugcgaaccaguaguaccaaacgcaccaccagcauacgaaaaacuaucagcagaacaaucaccaccaccauacucaccauaa

SEQ ID NO: 3829 - RNA, 1482 nt, Artificial Sequence
  EAW93427 variant
auguuaccuagaugggaauuagcucucuauuuauuagcuucacuaggcuuucauuuuuauucauucuaugaaguauacaaaguaucaagagaacaugaagaagaacuugaccaagaauuugaacuugaaacagacacacuauuugguggucuuaaaaaagaugcaacagauuucgaauggucauuuuggauggaauggggaaaacaaugguuaguauggcuauuauuaggacacaugguaguaucacaaauggcaacauuacuagcccgcaaacauagaccauggauauuaauguuauauggaaugugggcauguugguguguuuuaggaacuccaggaguagcuaugguauuacuccacaccacaauaucauuuugugucgcacaauuccgaucucaauuauuaacaugguuauguucuuuauuauuacuauccacauuaagacuacaaggaguagaagaagucaaaagacgaugguauaaaacagaaaaugaauauuaucuuuuacaauuuacauuaacaguaagauguuuauauuauacaucauuuucuuuagaauuauguuggcaacaauuaccagcugcaaguacaucuuauucauucccauggaugcuagcuuauguauuuuacuaucccguuuuacauaauggaccaauucuaucauuuucagaauuuauaaaacaaaugcaacaacaagaacaugauucauuaaaagcaucccuuuguguauuagcucuaggccuaggaagauuauuauguugguggugguuagcagaacuaauggcacaucuaauguauaugcacgcuauauauuccucaauaccacuacuugaaacaguaucaugcuggacuuuaggagguuuagcccuagcacaaguauuauucuucuauguuaaauaucucguauuauuugguguuccagccuuacuaaugcgacuagacggccuuacaccaccugcacuacccagaugcguaucaacaauguuuuccuuuacaggaauguggcgcuauuuugauguaggucuacauaacuuucucauaagauacguauacauaccaguaggaggaucacaacauggacucuuagguacacuauuuucaacagcaaugacuuucgcuuuuguaucauauuggcauggaggauacgauuauuuaugguguugggcagcauuaaauugguuaggaguaacaguagaaaacggaguccgacgacuuguugaaacaccauguauacaagacucucuugcaagauauuuuucaccucaagcaagacguagauuccaugcugcauuagcaucuuguucuacaucuauguuaauauuaaguaaucuaguauuuuuaggugguaaugaaguaggcaaaacuuacuggaacagaauauuuauacaaggauggccauggguaacacuaucaguauuaggauuucuuuauuguuauagucauguagguauagcaugggcacaaacuuacgcaacagauuaa

SEQ ID NO: 3830 - RNA, 954 nt, Artificial Sequence
  AAD41349 variant
auggcaguucaagguucacaaagaagacuacuaggaucuuuaaauuccacaccaacagcaauaccacaacuaggacuagcagcaaaccaaacaggagcacgauguuuagaaguuucaauaucugacggacuauuuuuaucauuaggucuagucucauuaguagaaaacgcuuuaguagucgcaaccauagccaaaaacagaaaccuacacucaccaauguauuguuucaucugcugccuagcacuaucagaccuauuaguuuccggaucuaacgucuuagaaacagcaguaauauuacuacuagaagcaggagcauuagucgcaagagcagcugucuuacaacaauuagauaacguaauagauguuauaaccuguucaucuauguuaucaucacuauguuucuuaggugccauagcaguagauagauacauaucuauauuuuacgcucuaagauaucauucaauaguaacccuaccucgagccagacgugcaguagcagcaauauggguagcaucaguaguauuuucaacucuauucaucgcauacuaugaccacguagcaguauuacuaugcuuaguaguauucuuuuuagcaaugcuaguacuaauggcaguucuauauguacauauguuagcacgugcaugucaacaugcucaaggaauagcucgucuacacaaaagacaacgaccaguucaucaaggcuuuggacuuaaaggugcaguaacauuaacaauacuacuaggaauuuucuuucuaugcuggggaccauuuuuccuacacuuaacacuaauaguauuauguccagaacacccaacuuguggauguauauucaaaaauuuuaaccuuuuucuagcacuaauaauauguaacgcaauaauagauccacuaaucuacgcauuccauucacaagaacuaagacgcacauuaaaagaaguauuaacauguucaugguaa

SEQ ID NO: 3831 - RNA, 954 nt, Artificial Sequence
  AHC09522 variant
auggcaguacaaggcucacaaagacguuuauuaggaucauuaaauucuacaccuacugcaauaccacaacuaggauuagcagcaaaucaaacuggagcaagauguuuagaaguaucaauauccgauggacuauuuuuaucauuaggccuaguauccuuaguugaaaaugcucuaguaguagcaacaaucgcuaaaaaucgcaaucuccacagcccaauguacuguuuuauauguuguuuagcauuaucagauuuauuaguuucaggaucaaauguauuagaaacagcaguaauauuacuacuagaagcaggcgcauuagucgcaagagcagcaguauuacaacaacuagauaauguaauagauguaauaacuuguucaucaaugcucucuucauuaugcuuuuuaggagcuauagcaguagacagauacauaucuauuuucuaugcauuaagauaucacucaauaguaacacuucccagagcaagacgagcaguagccgcaauauggguugcaucaguaguauuuucaacacuauuuauagcuuauuaugaucauguugccguacuauuaugucuaguaguauuuuucuuagcaaugcuaguauuaauggcaguacuauauguacauaugcucgccagagcaugucaacaugcucaaggaaucgcaagauuacauaaaagacaaagaccaguacaccaaggauucgguuuaaaaggagcagucacauuaacuauucuuuuaggaauauucuuuuuauguuggggaccuuucuuucuacaccuaacauuaauaguauuauguccagaacauccaacauguggcuguauauuuaaaaacuuuaauuuauuuuuagcccuuauaauuugcaaugccauaauagacccacuaaucuaugcuuuucauucacaagaauuaagaagaacacuaaaagaaguauuaacauguucuugguaa

SEQ ID NO: 3832 - RNA, 954 nt, Artificial Sequence
  AHC09804 variant
auggccguacaaggaucacaacgacgacuacuuggcucucuaaauucuacaccaacagcaauaccacaacuaggacuagcugcaaaucaaaccggugcaagaugucuagaaguaucaauaucagacggauuauuuuuaucauuaggcuuaguuucauuaguugaaaacgcucuaguaguagcaacaauagcuaaaaauagaaacuuacauucaccaauguacuguuucauaugcugccucgcauuaucagaccuauuaguaucagguucaaacguacuagaaacugcaguuauacuacuacuagaagcaggagcccuaguagcaagagcagcaguacuacaacaacuagauaauguaauagauguuauuacauguucauccauguuaucaucucuauguuuccuaggagcaauagccguagauagauauauaucaauauuuuaugcacuaagauaccauucaauaguaacacuaccacgagcaagacaagccguugcagcaauauggguagcauccguuguauuuucaacacuauuuauagcauacuaugaccacguagcuguacucuuaugucuaguaguauuuuucuuagcaaugcuaguacuuauggcagucuuauacguacauaugcuugcucgugcuugccaacaugcacaaggaauagcaagauuacauaaacgucaacgacccguccaccaaggauuuggauuaaaaggugcaguaacauuaacaauauuacuuggaauauucuuuuuauguuggggaccauucuucuuacacuuaacacuuaucguuuuauguccagaacacccaacaugcggcuguauauucaaaaacuuuaaucuauuucuagcacuaauuauaugcaacgcaauaauagauccucuaauauacgcauuccauucacaagaacuaagacgaacccuuaaagaaguccuaaccuguucaugguaa

SEQ ID NO: 3833 - RNA, 954 nt, Artificial Sequence
  BAE94313 variant
auggcuguacaaggaucacaaagaagauuacuaggaucacuaaauucaacaccaacagcaauaccacaauuaggacuagcagcaaaccaaacuggagcaagaugucuagaaguaucaaucucagacggacuauuucuaucauuaggauuaguaucccuaguagaaaacgccuuaguaguagccacaauagcuaaaaacagaaaccuucacucacccauguauuguuucauauguugcuuagcacuaucugacuuauuagucucaggaucaaacguacuagaaacagcaguaauauuauuauuagaagcaggagcauuaguagcaagagcagcuguccuacaacaacuagacaacguaacugacguaauaaccugcuccuccaugcuaucaucacuaugcuuucuaggagccauagcaguagaccgauacaucucaauauucuacgcacuaagauaucacucaauaguaacccuucccagagcaagacgagcaguagccgcaauauggguagcaucaguaguauucucaacauuauuuauagcauacuaugaucauguagccguauuauuaugccuaguuguauuuuuccuugcaaugcuaguauuaauggcaguuuuauauguacacauguuagcaagagcaugucaacacgcacaaggaauagcaagacuacauaaaagacaaagaccaguacaucaaggauuuggauuaaaaggcgcaguaacacuaacaauauuacuaggcauuuucuuuuuauguugggguccauucuuucuacacuuaacacuuauaguacuuugcccagaacacccaacauguggaugcauauuuaaaaauuuuaaccuauuccuagcauuaaucauauguaaugcuauaauagacccauuaauauaugccuuccacucacaagaacuaagaagaacacucaaagaagucuuaacauguuccugguaa

SEQ ID NO: 3834 - RNA, 954 nt, Artificial Sequence
  AHC09531 variant
auggccguacaaggaucccaaagaagacuucucggaucauuaaauucuacaccaacugcaauaccacaacuaggacuagcugcaaaucaaacaggagccagauguuuagaaguaucaauaucugacggacuauuucuaucacuaggauuaguaucauuagucgaaaacgcauuaguaguugcuacaauagccaaaaaccgcaaccuucacucaccaauguauuguuucauauguugucuugccuuaucugaccuucuagucucaggaucaaauauguuagaaacugcagucaucuuauuauuagaagcaggagcccuaguagccagagcagcuguauuacaacaacuugauaauguaauagauguaauaacuuguucuucuauguuaucaucuuuauguuuccuuggagcaauugcuguagauagauacauauccauauuuuaugcuuuaagauaucauucaauaguaacccuaccaagagcacgacgagcaguagcagcuauauggguagcaucaguaguauuuucaacucuauuuauagcuuauuaugaucacguagcaguacuacuauguuuaguaguauuuuuccucgcaaugcuaguauuaauggcaguacuauauguacacauguuagcaagagcaugucaacaugcacaaggaauugcccgacuacauaaaagacaaagaccaguucaucaaggauucggacuaaaaggagcaguaacauuaacaauacuauuaggcauauucuuccuauguuggggaccauucuuuuuacaucuaacauuaauaguucuauguccagaacauccaacauguggauguauauuuaaaaacuuuaaucuauuuuuagcccuaauaauauguaacgcaauaauagacccucuaauauacgcauuccauucucaagaauuacgacguacauuaaaagaaguacuuacauguucaugguaa

SEQ ID NO: 3835 - RNA, 954 nt, Artificial Sequence
  BAE94311 variant
auggcaguacaaggaucacaacgaagacuauuaggcucacuaaauuccacaccaacagccauaccacaauuaggacuagcagcaaaucaaacaggagcacgaugcuuagaagucucaauaucagacggacuauucuuaucacucggacucguaucucuaguagaaaacgcucuaguaguagcaacaauugcuaaaaaucaaaaccuacacucaccaauguacugcuucauaugcugccuagcacuaucagaccuauuaguaucaggaucaaauguacuagaaacagcaguaauauuacuacuagaagcaggagcacuuguugcccgagcagcaguauuacaacaauuagauaacguaauagauguaauaacaugcucauccaugcuaucaucacuaugcuuuuuaggugcaauagcuguagauagauacauaucaauauucuacgcacuaagauaccauucaauaguaacucuaccaagagcuagacaagcaguagccgcaauauggguagcaucagucguauucucaacacuauucauagcuuauuacgaccacguugccguauuauuaugccuaguuguauucuuuuuagccaugcuagucuuaauggcaguucuauacguacacauguuagcaagagcaugccaacacgcacaaggaauagcaagacuacacaaaagacaaagaccaguacaccaaggauucggacuaaaaggcgcagucacacucacaauauuacuaggaauauucuuucuauguuggggaccauuuuuccuacacuuaacauuaauaguauuaugccccgaacacccuacaugcggauguauuuucaaaaacuucaaccuauuccuagcccuaauaauauguaaugcaauaauagacccacuaauauacgcuuuccacucacaagaauuaagaagaacacuaaaagaaguacuaacaugcucaugguaa

SEQ ID NO: 3836 - RNA, 954 nt, Artificial Sequence
  BAE94309 variant
auggcuguacaaggcucacaaagacgccuauuaggaucacuaaauucaacaccuacugcaauuccacaacucggacuagcagcaaaucaaacaggagcuagaugucuagaaguaucuauaucugauggucuauuuuuaucuuuaggccuaguaucauuaguagaaaacgcccuaguaguagcaacaauugcuaaaaaccguaaccuacauuccccaauguacuguuucauauguuguuuagcacuaucagauuuauuaguuucaggauccaauguacuagaaacagccguuauauuauuauuagaagcuggagcucuaguagcaagagcagcagucuuacaacaacuugacaauguaauagauguaauaacauguucaucaauguuaucaucucuuuguuucuuaggagcaauagcaguagauagauacauaucaauauuuuacgcucuaagauaccauucuauuguaacacuaccacgagcaagacaagcaguaggagcuauauggguugcaucaguaguauuuucuacuuuauuuauagcauacuaugaucauguagcagucuuauuaugucucguaguauucuuuuuagcaaugcuuguuuuaauggcaguacuauauguacauaugcuugcaagagcaugccaacaugcacaaggaauagcuagacuccauaaacgacaaagaccaguucaucaaggauuuggauuaaaaggcgcaguuacacuuacaauacuauuaggaauauucuuucuauguugggguccauucuuucuacaccuuacacuaauaguuuuauguccagaacacccaacauguggauguauauuuaaaaauuuuaauuuauuuuuagcauuaauaauauguaacgcaauaauagacccauuaauauacgcauuucauucacaagaauuaagacguacauuaaaagaagucuuaacauguuccugguaa

SEQ ID NO: 3837 - RNA, 954 nt, Artificial Sequence
  BAE94308 variant
auggcaguacaaggaucucaaagaagacuacuaggaucauuaaauucaacaccuacagcaauaccacaauuaggacuagcugcuaaccaaacuggagcaagaugccuugaagucucaauaucagauggucuauuccuaucauuaggauuaguuucuuuaguagaaaacgcauuaguugucgcaacaauagcuaaaaauagaaacuuacauucaccuauguacugcuucaucugcuguuuagcacuaucagaccucuuaguaucugguucaaauguauuagaaacagcaguaauacuuuuacucgaagcaggagcauuaguagcacgagcagcaguacuacaacaauuagacaauguaaccgacguaauaacauguucuucaauguuaucaucauuaugcuuuuuaggagcaauagcaguagauagauacauaucaauauuuuaugcacuacgcuaucauucaauaguaacucuaacacgagcccgcagagcaguagcagccauauggguugcaucaguaguauucucaacauuauucauagcauacuacgaccauguagcaguacuauuaugucuagucguauucuuucuagcaauguuagucuuaauggcaguacucuacguacacaugcuagcaagagcaugucaacaugcacaaggaauagcaagauuacacaaaagacaaagacccguacaccaaggauuuggacuaaaaggugcaguaacacucacaauacuacucggcauauucuuuuuaugcuggggaccauuuuuccuacacuuaacauuaauaguacucuguccagaacaucccacaugcggaugcauauuuaaaaacuucaaccuauuucuagcauuaauaauauguaaugcuauuauagauccacuuauauaugcauuucacucacaagaacuaagaagaacauuaaaagaaguacuaacauguucaugguaa

SEQ ID NO: 3838 - RNA, 954 nt, Artificial Sequence
  BAE94307 variant
auggcaguccaaggaucacaaagaagacuauuaggaucacuaaacucaacuccaacagcaauaccccaacuaggauuagcugcaaaucaaacaggagcaagaugucuagaaguaucaaucucugauggacuauuucuuucauuaggucuaguuucacucguagaaaacgcauuaguuguagcaacaaucgcuaaaaacagaaacuuacauucaccaauguauuguuucauaugcugcuuagcacuauccgaccuccuaguauccggaucuaauaugcuagaaacagcaguuaucuuacuacuugaagcaggagcauuaguagcaagagcagcaguauuacaacaauuagacaauguaauagauguuauaacauguucauccauguuaucaucuuuauguuucuuaggagcaauagcuguagauagauauauaucuauauuuuacgcauuacgauaucauucaauaguaauauuaccuagagcacgacgagcaguagcagcaauauggguugcaucaguaguauuuucaacauuauuuauagcauacuaugaucaugucgcugucuuauuaugucuaguagucuuuuucuuagcaauguuaguauuaauggcuguacuauauguacacauguuagcaagagcuugucaacaugcacaaggcauagcaagauuacauaaacgccaaagaccaguacaucaaggauuuggauuaaaaggagcaguuacccuuacaauauuauuaggaauuuucuuuuuaugcuggggaccauucuuuuuacaucuaacauuaauagucuuaugcccagaacauccuacaugcggaugcauauuuaaaaacuucaaucuauuucuagcacuaauaauauguaaugcuauaaucgacccuuuaauauacgcuuuccacucacaagaacuaagacgaacacuuaaagaaguacuuacauguucaugguaa

SEQ ID NO: 3839 - RNA, 951 nt, Artificial Sequence
  BAE94306 variant
auggcaguccaaggaucccaacgaagauuacuaggaucuuuaaauagcacaccaacagcaauaccucaauuaggauuagcugcaaaucaaacaggugcaagaugucuagaaguaucaauaucugacggucuauuuuuaucauuaggacuuguuucccuuguugaaaaugcuuuaguaguugcaacuauagccaaaaauagaaacuuacauucucccauguauuguuucauauguugucuagcauuaucagacuuacuuguaucaggaucaaauguucuagaaacugcaguaauuuuacuucuagaagcaggagcucuuguagcaagagccgcuguuuuacaacaacuugauaacguaauagauguaauaacaugcucaucuaugcuaucaucucuuuguuuccuaggagcuaucgcagucgacagauacauaucaauuuaugcauuaagauaccauucaauaguuacauuaccacgagcuagacaagcaguagcagcaauauggguagcaucaguuguauuuucaacauuauuuauagcauauuaugaucacguugcuguauuauuauguuuaguaguauuuuuccuagcaauguuaguuuuaauggcaguauuauauguacauaugcuagcaagagcaugccaacaugcacaaggaauugcaagauuacacaaaagacaacguccaguacaucaaggauuuggacuuaaaggcgcagucacauuaacaauauuacuuggaauauucuuccuauguuggggaccauucuucuuacauuuaacacucauaguuuuauguccagaacauccaacaugcgguuguauauuuaaaaacuuuaauuuauuuuuagcacuaauaauaugcaaugcaauaauagauccacuuauauaugcauuccauucacaagaauuaagaagaacacuaaaagaaguauuaacaugcucaugguaa

SEQ ID NO: 3840 - RNA, 954 nt, Artificial Sequence
  AAQ62977 variant
auggcaguucaagguucacaaagaagauuacuaggaucucuaaacucaacacccacagcaauaccacaacuuggacuagcagcaaaccaaacaggcgcaagaugcuuagaaguaucaauaucagacggauuauuucuuucucuaggucuaguaucacucguagaaaaugcccuaguaguagccacaauagcuaaaaaucgcaaucuacacucaccaauguacuguuucauuuguugccuagcacuaucagauuuauuaguaucaggaucaaauguauuagaaacugcaguaauauuacuacucgaagcaggagcccuaguagcaagagcagcaguucuacaacaacuagacaauguaauagauguaauaacauguucaucaauguuaucaucucuaugcuuccucggagcaauagcuguagaccgauacauauccauauucuacgcauuaagauaccauucaauaguuacacuaccuagagcacgcagagcaguagccgcaauauggguugccucaguaguauucucaacuuuauucauagcauacuaugaccauguagcaguacuacuauguuuaguaguauucuucuuagcaauguuaguauuaauggcaguacuuuauguacauauguuagcaagagcaugucaacaugcacaaggaaucgcaagacuacacaaaagacaaagacccguacaccaaggauucggacuaaaaggagcaguaacacuaacaauucuacuaggaauauucuuuuuauguuggggaccauucuuuuuacaucuaacacuaauaauacuuugcccugaacacccaacauguggaugcauauuuaaaaacuuuaaucuauucuuagcauuaauaauaugcaacgcaauaaucgacccucuaauauacgcauuccacucacaagaauuaagaagaacucuaaaagaaguacucacaugcucaugguaa

SEQ ID NO: 3841 - RNA, 954 nt, Artificial Sequence
  AAQ62975 variant
auggcaguacaaggaucucaacgacgacuauuaggaucacuaaauucuacaccaaccgcaauuccacaacuagguuuagccgcaaaucaaacaggugcaagaugucuagaaguaucaauaucagacggacuauuuuuaucuuuagguuuaguaucauuaguagaaaaugcucuaguagucgcaacaauugccaaaaacagaaauuuacacucaccaauguacugcuucauaugcuguuuagcacuaucagacuuauuaguaucagguucaaacguauuagaaacugcaguaauccuauuacuagaagcaggagcauuaguagcaagagcaguuguacuccaacaacuugauaauguuauagauguaauaacauguucaucaaugcucucaucucucuguuuucuaggugcuauagcuguagacagauauauaucaauauuuuaugcacuacgauaccauuccauaguaacacuaccuagagcaagacgagcugucgcagcaauauggguagcauccguuguauuuagcacacuauuuauagcauacuaugaucacguagcaguacuccuaugccuagucguuuucuuccuagcaauguuaguauuaauggcaguucuauauguacauauguuagcaagagcaugucaacaugcacaaggaauagcaagauuacauaaaagacaaagaccaguacaucaaggauuuggacuuaaaggugcaguaacauuaacaauacuauuaggaauauucuuuuuaugcuggggaccauuuuuccuacaucuaacccuaauagucuuaugcccagaacacccaacauguggauguauauuuaaaaacuucaaucuauuuuuagcacuaauuauauguaacgcaauuaucgacccacuaauauacgcuuuccauucacaagaacuaagacgaacacuaaaagaaguuuuaacauguucuugguaa

SEQ ID NO: 3842 - RNA, 954 nt, Artificial Sequence
  AAQ62974 variant
auggcaguacaaggaucacaacgacgacuacuaggaucacuaaacucuacacccacagcaauaccccaacuaggacuagccgcaaaccaaacaggagcaagaugucuagaaguaucaauaucagacggcuuauuccucucauuaggauuaguaucauuaguagaaaacgcccuaguaguagccacaauugccaaaaaccgaaaucuacauucaccaauguacugcuucauaugcuguuuagcacuauccgacuuauuaguaucugguucaaauguacuagaaacagcaguaauacuacuauuagaagcaggagcucuaguagcacgagcagccguauuacaacaacuagauaauguaauagauguaauaacauguucaucuauguuaucaucacuauguuuccucggagcaauagcagucgaccgauacauaucaauauuuuacgcccuuagauaucauucaauuguaacauuaccaagagcuagacgagcaguugcugcaauauggguagcuucuguugucuuuucaacauuauucauagcauacuacgaccaugucgcaguauuacuaugcuuaguaguauucuuuuuagcaaugcucguacuaauggcaguauuauacguacauaugcuagcaagagcaugucaacacgcacaaggcauagcaagauuacacaaaagacaaagaccaguucaccaaggauuuggacuaaaaggugcaguaacauuaacuaucuuauuagguauauuuuuccuauguuggggaccauucuuucuacauuuaacacucauaguuuuaugcccagaacacccaacauguggauguauauuuaaaaacuuuaauuuauuuuuagcacuaauuauaugcaacgcaauuauagacccauuaauuuacgcauuccacucacaagaauuaagaagaacacuaaaagaaguauuaacaagaucaugguaa

SEQ ID NO: 3843 - RNA, 954 nt, Artificial Sequence
  AAQ62973 variant
auggcaguacaaggcucucaaagacguuuauuaggaucacuaaauucaacaccaacagcaauaccacaauuagguuuagccgcuaaucaaacaggugcaagaugucuugaaguaucaauaucagauggacuauuuuuaucauuaggccuuguaagucuaguugaaaaugcauuaguaguugcaacaauugcuaaaaaucguaaccuacauucaccaauguauuguuuuaucuguugccuagcauuaucagaccuauuaguauccgguucaaauguauuagaaaccgcaguaauauuauuacuugaagcaggagcuuuaguagcaagagcagcaguauuacaacaauuagacaauguaauagauguaauaacauguucaucaauguuaucaucucuuuguuuccuuggagcaauagcaguagacagauacauuucaauauuuuaugcauuacgcuaucauucaauaguaaccuuaccaagagcaagacgagcaguagcugcaaucuggguagcuucaguaguauucucaacacuauuuauugcauauuaugaccacguagcuguauuacuuugucuaguaguuuucuuucuagcaauguuaguacuaauggcaguacuauauguacauaugcuagcaagagcaugucaacaugcacaaggaauagcaagauuacacaaacgucaaagaccaguacaucaaggauuuggauuaaaaggcgcaguaacauuaacaauauuacuaggaauauucuuuuuaugcuggggcccauucuuuuuacaccuaacauuaaucguauuauguccagaacauccaacauguggcuguauauuuaaaaauuuuaacuuauuuuuagcuuuaauaauauguaaugcaauaauugauccacuuauauaugccuuucauucacaagaauuaagacgaaugcuaaaagaaguauuaacauguucaugguaa

SEQ ID NO: 3844 - RNA, 954 nt, Artificial Sequence
  AAQ62972 variant
auggcaguacaaggaucacaaagaagacuauuaggcucacuaaacucaacuccaacugcaauaccacaauuaggacuugcagcaaaucaaacaggagccagaugucuagaagucucaauaucagacggacuauuccuaucacuaggcuuaguaucauuaguugaaaaugcauuaguaguagccacaauagcuaaaaauagaaaucuacacucaccaauguauugcuuuauaugcugccuagcauuaucagaccuucuaguaucuggaucaaauguuuuagaaacagcaguaauuuuauuacuugaagcaggagcacucguagcaagagcagcaguauuacaacaacuagacaauguaauagacguaauaacaugcucaucuauguuaucaucccuaugcuuccuaggagcaauagcaguagauagauacauaucaauauucuaugcccuacgauaccacucaauaguaacauuaccaagagccagacgagcaguagcagcaauauggguagcauccguaguuuucucuaccuuauuuauagcauacuacgaccacguagcaguacuauuaugucuaguaguauuuuuccuugcaauguuaguuuuaauggccguccuauauguccacauguuagccugggcaugucaacacgcacaaggcauagcaagauuacacaaacgucaaagaccaguacaucaaggcuucggacuaaaaggagcaguaacauuaacaauauuauuaggaaucuucuuccuaugcuggggaccauucuuccuacaccuaacauuaauuguacuauguccagaacauccaacaugcggaugcauauuuaaaaacuuuaacuuauuuuuagcauuaauaauauguaacgcaauaauagacccauuaauauaugcauuccacucccaagaacuaagaagaacauuaaaagaaguauuaacaugcucaugguaa

SEQ ID NO: 3845 - RNA, 954 nt, Artificial Sequence
  AAQ62971 variant
auggccguacaaggaucccaaagacgauuacuuggaucauuaaauucuacaccaacagcaauaccccaacuaggauuagcagcaaaccaaacuggagcaagaugucuagaaguaucaauaucugacggauuauuucuaucacuaggccuaguaucacucguagaaaacgcauuaguaguagcaacaauagccaaaaacagaaaucuccauuccccaauguacugcuuuauaugcuguuuagcauuaucagaucuauuaguauccggcucaaacguacucgaaacagcaguaauauuauuacuugaagcuggagcauuaguagcaagagcugcaguacuacaacaacuugacaauguaauagacguaauuacaugcucaucaaugcuaucaucauuaugcuuuuuaggagcuauugcaguagauagauacaucucuauauucuaugcacuaagauaccauucaauaguaacauuaccacaagcaagacgagcaguugcagcaauauggguagccucaguaguauuuucuacucuuuuuauagcauauuaugaucauguagcaguacuacucugccuaguaguauucuuccuagcaaugcuaguauuaauggcaguacuauacguacacauguuagcaagagcaugucaacaugcacaaggaauagccagacuacacaaaagacaaagaccaguacaccaaggauucggauuaaaaggagccguaacacuaaccaucuuauuaggaauauuuuuccuauguuggggaccauuuuucuuacauuuaacacucauaguauuauguccagaacacccaacaugcggaugcauauuuaaaaacuucaaccucuuccuagcauuaaucauauguaaugcaauaauagaucccuuaauauacgccuuccacucacaagaauuaagaagaacacuaaaagaaguacuaacaugcucuugguaa

SEQ ID NO: 3846 - RNA, 954 nt, Artificial Sequence
  AAQ62970 variant
auggcaguacaaggaucacaaagaagacuacuaggaucacuaaacucaacaccaaccgcaauuccacaacuagguuuagcagcaaaucaaacaggagcaagaugucuagaagucucuauaucagauggacuauuucuaucuuuagguuuaguaucucucgucgaaaacgccuuaguaguagcaacaauugccaaaaacagaaaucuucauucuccaauguauuguuucauaugcugucuagcacuauuagacuuacucguaucaggaucaaauguauuagaaacagcagucauauuacuauuagaagcuggagcccuaguagcacgagcagcaguucuucaacaacucgauaaugucauagauguaauaacauguucaucuaugcuaucaucucuauguuucuuaggagcaauagcaguagauagauacauaucaauauuuuacgcuuuaagauaccauucaauaguaacuuuaccacgagcaagacgagcaguagcagcaauauggguagcaucaguugucuuuucuacuuuauuuauagcauauuaugaccauguugcaguacuucuauguuuaguuguauuuuucuuagcaauguuaguacuaauggcaguauuauacguacauaugcucgcaagagcaugucaacaugcacaaggaauugcacgcuuacauaaaagacaaagaccaguccaccaaggauuuggauuaaaaggagcaguaacacuaacaauccuacuaggaauauucuuucuauguuggggaccuuucuuuuuacaccuuacacuaauaguauuauguccagaacacccaacaugcggaugcauauuuaaaaauuuuaaucuauuucuagcacuaauuauauguaacgcuaucauagacccacuaauauacgcauuucauucacaagaacuccgaagaacacuuaaagaaguacuaacaugcucaugguaa

SEQ ID NO: 3847 - RNA, 954 nt, Artificial Sequence
  AAQ62969 variant
auggcuguacaaggaagucaaagaagauuacucggaucacucaauucaaccccuacagcaauaccacaauuaggauuagcagcaaaccaaaccggagcaagaugcuuagaaguauccauaucagacggacuauuacuaucucuaggauuaguaagucuaguagaaaaugcauuagucguagcaacuauagccaaaaacagaaaucuccauucaccaauguacuguuuuauauguuguuuagcauuaucagacuuauuaguaucuggaucuaauguccuugaaacagcagucauacuucuacuugaagcaggagcauuaguugcaagagccgcaguauuacaacaauuagacaauguaauagacguaauaacuuguucaucaaugcuaucaucuuuaugcuuucuaggagccauagccguagauagauauauaucaauauuuuaugcacuaagauaucacucuauaguaacuuuaccaagagcccgacgugcaguugcagcaauauggguagcaucaguuguauuuuccacacuauucauagcuuauuaugaccacguugcaguauuacuaugucuaguuguauucuuccuagcaauguuaguauuaauggcaguauuauacguccauauguuagcucgagcaugucaacacgcacaaggaaucgcaagacuacauaaaagacaaagaccuguacaucaaggauuuggauuaaaaggagcaguuacacuaacaauuuuacuaggaauauuuuucuuauguugggguccauucuuuuuacaucuaacuuuaauuguacuaugcccagaacauccaacaugcggaugcauauuuaaaaacuuuaauuuauuuuuagcacuaauaauaugcaaugcaauaauagaucccuuaauauacgcauuucacucacaagaauuacgacgaacauuaaaagaaguacuaacauguucaugguaa

SEQ ID NO: 3848 - RNA, 954 nt, Artificial Sequence
  AAO21073 variant
auggcaguacaagguucacaaagaagacuacucgguucauuaaacagcacaccuaccgccauaccacaacuaggauuagcagcaaaucaaacaggagcuagauguuuagaagucucuauaucugauggacuauuuuuaucacuaggucuagucucccuaguagaaaaugcucuaguaguagcaacaauagcuaaaaaccguaaccuccacucaccaauguacuguuuuauuuguuguuuagcauuaucagacuuauuaguaucaggaucaaacguacgagaaacugcagucauauuauuauuagaagcaggagcccuaguagcacgagcagcaguauuacaacaauuagacaacguuauagacguaauaacauguucaucaauguuaucaucucucuguuucuuaggagcuauagcaguagauagauauauauccauauuuuacgcacuacgauaucauucaaucguaacucuaccaagagcucgcagagcaguagcagcaauauggguagcuucaguuguauuuucaacauuauuuauagcauacuaugaccaugucgccguccuucuauguuuagucguauuuuucuuagcaaugcuaguacuaauggcaguuuuauauguacauaugcuagcaagagcaugucaacaugcacaaggaauagcaagauuacauaaaagacaacgaccaguacaccaaggauuuggauuaaaaggagcaguaacauuaacaauauuauuaggaauuuucuucuuauguuggggaccauucuuucuacacuuaacacuaauaguucuauguccagaacacccaacauguggauguauuuuuaaaaauuuuaauuuauuuuuagcacuaauaauauguaacgcaauaauugacccacuaauuuacgcauuucauucacaagaauuaagaagaacuuuaaaagaaguacucacauguucaugguaa

SEQ ID NO: 3849 - RNA, 954 nt, Artificial Sequence
  AHC09567 variant
auggcaguacaaggaucccaacgacgauuacuaggaucacuaaauucaacuccaaccgcuauaccccaauuaggacuagcugcuaaucaaacuggagcacgaugccuugaagucucuaucucugauggauuauuuuuaucauuaggucuagucucucuuguagaaaacgcccuaguagucgcuacaauagcuaaaaauagaaauuuacauucuccaauguacuguuuuauaugcugucuagcacuaccagauuuauuaguuucuggaucaaauguauuagaaacagcaguaauacuacuacuugaagcaggagcauuagucgcaagagcagcuguacuacaacaacuagacaauguaauagacguaauuacaugcucaaguaugcuaucaucauuauguuucuuaggagcaauagcaguugaucgauauauaucuauauuuuacgcauuaagauaucauucaauaguuacacuaccaagagcaagacgagcaguagcagcuauauggguagcuucuguaguauuuucaacacuauuuauagcauacuaugaucauguagcuguauuacuauguuuaguaguauucuuuuuagcaaugcuaguacuaauggcaguacuauauguacauaugcuugcaagagcaugucaacaugcacaaggaauugcacgacuacauaaaagacaaagaccaguacaucaaggcuuuggauuaaaaggagcaguaacauuaacaaucuuauuaggaauuuucuuuuuauguugggguccauucuuuuuacaccuaacacuuauaguuuuauguccagaacauccaacaugcggcuguauauuuaaaaauuucaauuuauuuuuagcauuaauaauaugcaaugcaauaauugauccuuuaauauaugcauuucacucacaagaacuaagaagaacauuaaaagaaguauuaacauguucaugguaa

SEQ ID NO: 3850 - RNA, 954 nt, Artificial Sequence
  AHC09812 variant
auggcaguacaaggaucacaacgacgacuauuaggaucauuaaauucaacaccaacagcaauaccccaauuaggacuagcagcaaaucaaaccggagcaagaugcuuagaaguaucuauauccgacggacuauuucuaucauuaggauuaguaucccuaguagaaaacgcauuagucguagcaacaauagccaaaaauagaaaucuacacucaccaauguacuguuuuauauguuguuuagcauuaucagaccuauuaguaucagguucaaauguacuagaaacagcaguuauacucuuauuagaagcuggagcauuaguagcuagagcagccguacuacaacaauuagauaaugucaucgauguaauaacaugcucaucaaugcuaucaucuuuaugcuucuuaggugcaauagcaguagacagauacauaucaaucuucuaugcauuacgauaccauucaauagucacauuaccaagagcaagacgagcaguugcagcaauauggguagcaucaguaguauucucaacacuauucauagcauauuaugaucacguagcaguacuacuaugcuuaaugguauuuuuccucgcaaugcuaguucuaauggcaguuuuauauguacacaugcuagcaagagccugccaacacgcacaaggaauagcaagacuacacaaaagacaaagaccaguacaccaaggauucgguuuaaaaggagcaguaacacuaacaauccuauuaggaauuuucuuccuaugcuggggaccauucuuuuuacauuuaacacuaauaguccuaugcccagaacacccaacaugcggcuguaucuucaaaaacuuuaauuuauuuuuagcacuaauaauauguaacgccauaaucgacccacuaauauacgcauuucauucccaagaauuaagaagaaccuuaaaagaaguacucacaugcucaugguaa

SEQ ID NO: 3851 - RNA, 954 nt, Artificial Sequence
  AHC10192 variant
auggcaguacaaggaucacaaagaagacuauuaggaucacuaaacucaacacccaccgcaauaccacaacuuggacucgcagcaaaucaaacaggcgccagaugccuugaaguaucaauaucugacggacuauuccuaucauuaggucuagucucucuaguagaaaaugcccuagucguagcaacaauagcuaaaaauagaaaucuacacucaccuauguacugcuucauaugcugccuagcauuaucagacuuauuagucucaggaucaaacguauuagaaacagcaguaauacuacuacuagaagcaggagcucuaguagcaagagcagcaguauuacaacaacuagacaacguaauagauguuaucacaugcucaucaauguuauccucuuuauguuuucucggagcaauagcaguagacagauauauaucaauauucuaugcauuaagauaccauucaauaguaaccuuaccaagagcaagacgagcaguugcagccauauggguagcaucaguaguauucucaacacuauuuauagcauauuacgaccacguagccguacuacuaugucuaguaguauucuucuuagcaaugcuaguuuuaauggccguacuauauguacauauguuagcaagagcaugccaacacgcacaaggaacagcaagacuccauaaaagacaaagaccaguacaccaaggauucggacuaaaaggagcagucacauuaacaauacuacuaggaauauucuuccucugcugggguccauucuuuuuacaucuaacauuaauaguacuauguccagaacacccaacaugcggaugcauauuuaaaaacuuuaaccuauuuuuagcacuaauaauaugcaaugcuauaauagauccacuaauauaugcuuuccauucucaagaacuaagaagaacauuaaaagaaguacuaacaugcucaugguaa

SEQ ID NO: 3852 - RNA, 954 nt, Artificial Sequence
  AHC09641 variant
auggcaguccaaggaucacaaagaagacugcuaggaucacuuaauuccacuccaacagcuauuccacaauuaggauuagcagcaaaucaaacaggagcaagaugucuagaaguaucaauauccgaugguuuauuucucucacuaggucuaguuucucuaguagaaaacgcucuaguuguagccacaauagcuaaaaacagaaaccuacacucaccaauguacugcuuuauuuguuguuuagcacuaucagaucuucuaguuucaggaucaaacguauuagaaacagcaguaauacuuuuauuagaagcaggagcauuagucgcaagagcagcaguacuacaacaacuugauaacguaauagauguaauuacauguucaucaauguuaucuucacuauguuucuuaggagcaauagcaguagaucgauacauaucaauauuuuacgcucuacgauaccauucaacuguaacucuaccaagagcuagacgagcaguagcagcaauauggguagcaucaguaguauucucaacacuauuuauagccuauuaugaccacguagcuguuuuauuauguuuaguaguauuuuuccuagcaauguuaguacuaauggcaguacuauauguacauauguuagcaagagcaugucaacaugcacaaggaauagcacgauuacauaaaagacaacguccaguacaccaaggauuuggacuaaaaggagcaguaacauuaacaauuuuauuaggaauauucuucuuauguuggggaccauuuuuccuacacuuaacauuaauaguacuauguccagaacacccuacauguggaugcauuuuuaaaaauuucaauuuauuuuuagcauuaauuauaugcaacgcaauaauugauccacuaauauacgcauuccauucacaagaauuacguagaacauuaaaagaaguacuaacauguucaugguaa

SEQ ID NO: 3853 - RNA, 954 nt, Artificial Sequence
  AHC10044 variant
auggcaguacaaggcucacaaagaagauuacuuggaucauuaaauucaacaccaacagccauuccccaacuaggauuagcagcaaaucaaacaggagcaagauacuuagaaguaucaauaucugacggacuauuucuaucucuaggucuaguaucucuaguugaaaacgcauuaguagucgcuacuauagccaaaaauagaaaccuacauuccccaauguauugcuucauuugcuguuuagcacuaucagaucuauuaguaucaggaucaaacguauuagaaaccgcaguaauacuauuacuagaagcaggagcacuuguagcaagagcagcaguacuacaacaacuagauaauguaauagauguaauaacaugcucaucaauguuauccucccuaugcuuccuaggagccauagcaguagaucguuauaucucaauauuuuacgcauuaagauaccauucaauaguaacauuaccaagagccagacgagcaguagcagcaauauggguagcaucaguaguauucucaacacuauuuauagcauacuacgaccacguagcagucuuauuaugccucguaguauucuuucuagcaaugcuaguccuaauggcaguacuauacguacauauguuagcacgugcaugccaacacgcacaaggaauagcacgcuuacacaaaagacaaagaccaguacaucaaggauuuggauuaaaaggagcaguaacacuaacaauacuauuaggaauauucuuccuauguuggggaccauucuuucuucauuuaacacuaauaguacuuugcccagaacacccaacaugcggauguauauucaaaaacuucaacuuauuuuuagcacuaauaauaugcaacgcaauaauagacccauuaauauacgcauuccacucucaagaauuacgacguacauuaaaagaaguauuaaccugcuccugguaa

SEQ ID NO: 3854 - RNA, 954 nt, Artificial Sequence
  AHC09532 variant
auggcaguacaaggaucacaaagacgcuuacuaggauccuuaaauucaacaccaacagcaauaccccaauuagguuuagcagcaaaucaaacaggagccagauguuuagaaguaucaauaucagacgguuuauuuuuaucacuaggcuuaguaucccuaguugaaaaugcccuaguacuagcaacaauugccaaaaacagaaauuuacacucaccaauguauuguuucauaugcuguuuagcauuaucagaucuucuaguuucaggaucaaauguacuagaaacugcaguaauacuucuacuugaagccggugcacuuguagcacgagcagcaguacuucaacaauuagauaauguaauagauguaauuacauguucaucaauguuaucuucauuaugcuuuuuaggagcaauagcaguagaucgauauauaucuauauuuuacgcauuaagauaucauuccauaguaacacuacccagagcaagacgagcaguagccgcuauauggguagcaucaguuguauuuucaacacuauuuauagcauacuaugaucauguugcuguacuuuuauguuuagucguauucuuuuuagcaaugcuaguauuaauggcaguacuuuauguacauauguuagcacgagcaugucaacaugcacaaggaauugcaagauuacauaaacgacaaagaccaguacaucaaggauuuggccuuaaaggagcaguaacccuaacaauacuauuagguauauucuuucuauguugggguccuuucuuuuuacaccuaacacuaauaguccuauguccagaacauccuacuuguggauguauuuuuaaaaauuuuaauuuauuucuugcauuaauaauaugcaacgcuauaauagauccauuaauauaugcuuuccauucacaagaacuccgaagaacauuaaaagaagucuuaacuugcucaugguaa

SEQ ID NO: 3855 - RNA, 954 nt, Artificial Sequence
  AHC11042 variant
auggcaguucaaggaucccaaagaagauuacuaggaucauuaaacuccacaccaacugcaauuccacaacuaggauuagcagcaaaucaaacaggagcaagauguuuagaaguaucuauaucagacggucuauuucuaucuuuaggucuagucucucuaguagaaaacgcacuuguaguagcaacaauagccaaaaaccgaaaucuacacucaccaauguauuguuucauuugcuguuuaccacuaucagaucuccuaguuucaggaucaaauguacuagaaacagcaguaauauuauuauuagaagcaggagcccuaguagcacgugcagcugucuuacaacaauuagacaauguaauagauguaauaacauguucaucaauguuaucaucauuauguuucuuaggagccauagccguagacagauacauaucaaucuucuaugcucuaagauaccauucaauaguaacacuuccuagagccagacgugcaguugcagcaauauggguagcuucuguagucuuuucaacacuauuuauagccuauuaugaccauguagcaguauuacuauguuuaguaguauucuuucuugcaauguuaguucuaauggcaguauuauauguacauauguuagcacgagcaugccaacacgcacaaggaauagcaagacuacauaaacgacaaagaccaguacaccaaggauuuggauuaaaaggagcaguaacauuaacaauauuacuaggaauuuucuuucucuguuggggaccauucuuucuucaucuuacauuaauaguacuaugucccgaacacccuacaugcggaugcauauuuaaaaacuuuaauuuauuuuuagcacucauaauauguaacgcaauaauugacccacuaauuuacgcuuuucauucacaagaacuaagacgaacacuuaaagaaguacuaacauguucaugguaa

SEQ ID NO: 3856 - RNA, 954 nt, Artificial Sequence
  AHC10733 variant
auggcaguacaaggaucacaaagaagauuauuaggaucacuaaauuccacaccuacagcaauaccacaauuaggacuagcagcaaaucaaacaggagcccgcugcuuagaaguaucuauaucagacggacuauuucuuucucuaggauuaguaucucuaguagaaaacgcucuagucguagcaacaauagcuaaaaacagaaaucuacauucaccaauguacuguuucaucugcugucuagcacuuucugaucuauuaguuucaggaucaaauguauuagaaacagcaguaauauuacuauuagaagcaggagcucuaguagcaagagcagcaguacuucaacaacuagauaauguaauagauguaauaacaugcucaucuauguuaucuuccuuaugcuuccuaggagcaauagcagucgacagauauauuucuauauucuacgcauuaagauaucauucaauaguuacauuaccaagagcucgacgagcaguagcagcaauauggguagcaucaguaguauuuuccacauuauuuauagcuuauuaugaccauguagccguacuccucugcuuaguaguauuuuucuuagcaaugcucguauuaauggcaguucuauauguacauauguuagcaagagcaugucaacaugcacaaggaauagcacgauuacauaaaagacaaagaccaguacaucaaggauuuggauuaaaaggagcaguaacccuuacaauauuauuaggaauauucuuucuauguuggggaccauucuuucuacauuuaacacuuauaguauuauguccagaacaucccacauguggauguauauuuaaaaauuucucuuuauuucuagcauuaauuauaugcaacgcaauaauugauccacuaauauacgccuuccauucacaagaauuacguagaaccuuaaaagaaguacuuacaugcucaugguaa

SEQ ID NO: 3857 - RNA, 954 nt, Artificial Sequence
  AHC10696 variant
auggcaguacaaggaucccaaagaagauuauuagguucccuuaacucuacaccaacagcaaucccacaacuaggacuagcagcaaaucaaacaggagcaagaugcuuagaaguauccauaucugacggacuauuucuaucucuaggccuaguaucccuaguagaaaacgcauuaguaguagcuaccauagccaaaaauagaaaucuacauuccccaauguauugcuuuauauguugcuuagcauuaucugaccuauuaguaucaggaucaaauguacuagaaacugcagucauacuacuauuagaagcaggagcucuaguagcaagagcagcaguauuacaacaauuagacaauguaauagauguaauaacuugcucaucuauguuaucaucauuaugcuuccuaggagcaauagcagucgacagauauauaucuauauuuuaugcacuacguuaucacucaauuguaacauuaccaagagcaagacgcgcaguagcagcaauauggguagcaucaguaguauucucaacauuauuuauagcauauuaugaucacguagcaguacuacucugccuaguuguauucuucuuagcuauguuaguccuaauggcaguauuauauguacauaugcuagcucgagcaugucaacaugcacaaggaauagcaagauuacauaaaagacaaagaccaguacaucaaggauucggauuaaaaggcgcaguaacauuaaccaucuuauuaggaauauucuuucuaugcuggggcccuuucuucuuacaccuaacacuaauaguacuauguccagaacauccaacauguggaugcauuuuuaaaaauuuuaacuuauuuuuagcacuaauaaucuguaacgcaauaauagacccacuaauacaugcauuccauucacaagaacuuagaagaacauuaaaagaaguacuuaccuguucaugguaa

SEQ ID NO: 3858 - RNA, 954 nt, Artificial Sequence
  AHC09527 variant
auggcaguucaagguucacaaagaagauuauuaggcucauuaaauucaacaccaacugcaauaccccaacuuggacucgcagcuaaucaaacaggugcaagaugucuagaaguaucaauaucagauggauuauuucuaucucuaggucuaguaucuuuaguagaaaacgcauuaguuguugccacaauagccaaaaacagaaacuuacacucaccaauguauugcuucauaugcuguuuagcauuaucagaccuauuaguuucaggaucaaauguacuagaaacagcagucauccuucuauuagaagcaggcgcucuaguagcaagagcagcaguacuucaacaauuagauaaugucauagauguaauaacauguuccucaauguuauccuccuuauguuuccuaggcgcaauagccguagauagauacauaucaauauuuuacgcacuaagauaucauucuauagucacauuacccagagcaagacgugcaguugcagcaauauggguagcaucaguuguauuuucaacuuuauuuauagcuuauuacgaccauguugcaguauuacuaugucuaguaguauuuuuccuagcaauguuaguacuaauggcaguucuauauguacauauguuagcaagagcaugucaacaugcccaagguauugcacgacuacauaaaagacaacgaccaguacaucaaggauuuggacuaaaaggcgcaguaacauuaacaauauuacuuggaauauucuuccuauguuggggacccuuuuucuuacaccuuacauuaauaguucuauguccagaacacccuacuuguggauguauauuuaaaaauuuuaacuuauuucuagcacucauuauauguaaugcaauaauucacccucuaauauacgcauuccauucacaagaacuaagaagaacacuaaaagaaguauuaaccuguuccugguaa

SEQ ID NO: 3859 - RNA, 954 nt, Artificial Sequence
  AHC10869 variant
auggcaguucaaggaucacaaagaagauuauuagguucacuaaacucaaccccaacagcaauaccacaacuagguuuagcagcaaaccaaaccggagcaagaugccuagaaguuucaauaucugauggacucuuuuuaucucuaggccuaguuucccuaguugaaaacgcccuagucguugcaacaauagcuaaaaacagaaaccuacacucacccauguacugcuuuaucugcugucuagcauuaucagaccuccuaguaucaggaucaaauguacucgaaacagcagucauauuacuacuagaagcaggagcauuaguugcaagagcagcaguauuacaacaacuagacaacguaauagauguaauaacauguuccucaaugcuuucaucacuaugcuucuuaggagcaauagcaguagauagauauauaucuauauucuacgcauuaagauaccauuccauaguaacccuaccacgugcacguagagcaguagcagcaauauggguagcaucaguaguauucucaacacuauucauagcuuacuaugaucacguagcaguauuauuaugucuaguaguauuuuuccuagccauguuaguauuaauggcaguauuauauguucauauguuagcaagagcuugucaacaugcacaaggaauagcaagacuacacaaaagacaacauccaguacaccaaggauucggucuaaaaggagcaguaacauuaacaauauuacuuggaauauucuuccuaugcuggggaccauucuuuuuacauuuaacuuuaauaguacuauguccagaacacccaacauguggauguauauuuaaaaacuucaauuuauuuuuagcauuaauaauaugcaaugcuauaauagacccacuaauauacgcuuuccauucacaagaacuaagaagaacacuaaaagaaguacucacaugcucaugguaa

SEQ ID NO: 3860 - RNA, 954 nt, Artificial Sequence
  AHC11615 variant
auggcuguacaaggaucacaaagaagauuacucggaucacuuaacucaacaccaacagcuauaccacaauuaggacuagccgcaaaccaaacaggagcuagaugccuagaaguaucuauaucagacggauuauuucuaucauuaggauuaguaucauuaguagaaaaugcucuagucguagcaacaauagcuaaaaaccgcaauuuacacucaccaauguauugcuuuaucuguugucuugcucuaucagauuuauuaguaucugguucaaauguacuagaaacagcaguuauacuauuauuagaagcuggugcccuaguagcaagagcagcaguauuacaacaacuagacaauguaauagacgucauaacaugcucaucaauguuaucaucauuauguuuucuaggcgcaauagcaguagacagauacauaucaauauuuuaugcauuaagauaucacucaauaguaacauuaccuagagcccgcagagcaguugcagcuauauggguugcaucaguaguauucucuacacuauucauagcauacuaugaucacguugcaguacuacuaugcuuaguaguauucuuuuuagcuauguuaguacuaauggcaguacuauauguacacaugcuagccagagcaugucaacaugcacaaggaauagcuagauuacauaaaagacaacguccaguucaucaaggauuugguuuaaaaggugcaguaacuuuaacaaucuuauuaggaauauucuuuuuauguuggggaccuuucuuucuacaucuaacucuaauugucuuauguccugaacauccaaccuguggauguauauuuaaaaacuuuaauuuauuuuuaacacuaauaauaugcaaugccauaauugacccacuaauauacgccuuucacucacaagaauuaagacgaacauuaaaagaaguacuaacauguucaugguaa

SEQ ID NO: 3861 - RNA, 954 nt, Artificial Sequence
  AHC09535 variant
auggcaguacaaggaucacaaagacgacuauuaggaucucuaaauucaacaccaacagcaauaccacaauuaggauuagcagcaaaucaaaccggagcaagaugccuagaagucucuauaucugacggccuauuccuaucacuaggccuaguauccuuaguagaaaacgcauuaguaguagcuaccauagcuaaaaaccgaaauuuacacucaccaauguacugcuuuauauguugucuugcauuaucagaccuauuaguuucaggcucaaauguacuagaaaccgcaguaauauuacuacuagaagcaggagcucuaguagcaagagcagcaguauuacaacaacuagacaaugucauagaugucauuacauguucaucuaugcucucaucauuauguuuccuaggagcaauagcaguagaucacuacauaucuauauucuaugcauuaagauaucacucaauagucacacuaccccgagcacgcagagcaguugcagcuauauggguagccucaguaguauucucaacacuauucauagcauauuaugaccauguagcaguccuauuaugcuuaguuguauucuuucuagcaaugcuaguauuaauggcaguacuauauguacacauguuagcaagagccugucaacaugcacaaggcauagcacgacuacacaaacgacaacguccaguacaccaaggcuuuggacuaaaaggugcaguaacauuaacaauauuauuaggaauauucuuucuauguuggggaccauucuuucuacauuuaacauuaauaguacuaugcccagaacauccaacuugcggauguauauuuaaaaacuuuaaucuauuucuagcacuuauaauaugcaacgcaauaauagacccuuuaauuuacgcuuuccacucccaagaacuaagaagaacacuaaaagaagucuuaacauguucaugguaa

SEQ ID NO: 3862 - RNA, 954 nt, Artificial Sequence
  AHC11840 variant
auggcaguucaaggaucacaaagacgauuauuaggcucauuaaauuccacaccaacugcaauaccacaacuaggacuugccgcaaaucaaacuggagcaagaugcuuagaagucuccauaucagacgguuuauuucuaucauuaggccuaguaucucuaguugaaaaugcauuaguaguagcaacaauagccaaaaaccgaaauuuacauucaccaauguauuguuucauuugcugucuagcacuaucagaucuauuaguaucaggaucaaauguauuagaaacagccguaauauuacuacuagaagcuggagcucuaguagcacgagcagcaguauuacaacaauuagauaauguaaucgaugucauuacuuguucauccaugcuuucaucacuauguuuucuaggagcaauagcaguagacagauauauaucaauauuuuaugcuuuaagauaucauucaauaguaacucuaccaagagcaagacgagccguugcagcaauauggguagcaucaguaguauuuucaacacuauucauagcuuacuaugaccauguugcuguauuacuaugucuaguaguauucuuucuagcaaugcuaguuuuaauggcuguauuauauguacauaugcuagcaagagcaugccaacaugcacaaggaauagcaagauuacauaaaagacaaagacccguacaucaaggauuuggacuuaaaggagcuguuacccuaacaauacuacuaggaaucuucuuucuaugcuggggaccauucuuuuuacaucucacauuaauaguacuauguccagaacauccuacauguggaugcauauuuaaaaauuuuaauuuauuuuuagcacuaauuauaugcaacgcaauaauagacccacuaauauacgcuuuucauaaccaagaauuaagacgaacucuaaaagaaguucuaacauguucaugguaa

SEQ ID NO: 3863 - RNA, 954 nt, Artificial Sequence
  AHC09665 variant
auggcaguucaagguucacaaagaagauuauuaggaucauuaaauucaacaccaacugcaauaccacaauuaggauuagccgcaaaucaaaccggagcuagaugucuagaaguaucuauaucagacggacuauuucuaucccuagguuuaguaucauuaguagaaaacgccuuaguaguugcuacaauagcuaaaaauagaaaucuucauucaccaauguacugcuuuauaugcuguuuagcacuaucugaccuauuaguaucaggaucaaauguccuagaaacagccguaauacuauuauuagaagcaggcgcuuuaguugcucgagcagcaguauuacaacaacuagacaacguuauagauaugauaacauguucaucuaugcuauccucucuauguuuucuuggagcuauagcaguagacagauacauaagcauauuuuaugcauuaagauaccauucaauaguaacauuaccaagagcuagacgagcaguagcugcaauauggguagcauccguaguauucucaacacuuuuuauagcauauuaugaucauguagcaguauuauuauguuuaguaguauucuuucuagcaaugcuaguucuuauggcaguacuauauguacauauguuagcaagagcaugucaacaugcacaaggaauagcaagauuacauaaaagacaacgaccaguacaccaaggauuuggacuaaaaggcgcaguaacccuaacaauuuuacuaggaauauucuuucuaugcuggggacccuuuuuccuacaccuaacacucauaguucuauguccagaacacccaacauguggcuguauuuuuaaaaauuuuaaucuauuuuuagcauuaauaauauguaacgccauaauagaccccuuaauuuacgcauuccacucacaagaauuaagacgaacacuaaaagaaguauuaacuuguucaugguaa

SEQ ID NO: 3864 - RNA, 954 nt, Artificial Sequence
  AHC11324 variant
auggcaguacaaggaucccaacguagauuacuaggaucauuaaacucaacaccaacagcaauaccucaacuaggcuuagccgcaaaccaaacaggagcacgaugcuuagaaguaucaauaucagauggacuauuuuuaucuuuaggauuaguaucauuaguagaaaaugcauuaguaguagcaacaauagcuaaaaacagaaaccuacauuccccaauguauuguuuuaucuguugccuugcauuauccgaucuauuaguaucaggaucaaacguucuagaaacagcagucauucuauuacuagaagcaggagcauuaguagcuagagcagcaguauuacaacaauuagacaauguaauagacguaauaacuuguucaucaaugcuaucuucuuuaugcuuucuaggagcaauugcaguagacagauacauauccauauuuuaugcucucagauaucacucaauaguuacauuaccccgagcaagacgagcuguagccgccauuuggguagcaucuguaguauucucaacauuauuuauagcuuauuaugaucauguugcuguacuacuaugucuaguaguauucuuuuuagcaaugcuuguccuaauggcuguccuuuacguacacauguuagcaagagcaugccaacacgcccaaggaauagcuagacuucauaaaagacaaagaccaguacaucaagguuuuggacuaaaaggagcaguuacacuaacuauauuacuaggaauauucuuuuuaugcuggggaccauucuuuuuacaucuaacacuaauaguauuaugcccagaacauccaacaugugguugcauuuuuaaaaauuuuaaccuauucuuagcauuaaucauaagaaaugcuauaauagauccuuuaauauaugccuuucauucucaagaauuaagaagaacauuaaaagaaguauuaacuuguucuugguaa

SEQ ID NO: 3865 - RNA, 954 nt, Artificial Sequence
  AHC09521 variant
auggcaguacaaggaucacaaagaagauuacuuggaucauuaaauucaacucccacagcaauaccccaauuagguuuagcagcuaaucaaacaggcgcuagauguuuagaaguaucuauaucagauggauuauuucuaucuuuaggauuaguaucacuuguugaaaacgcucuaguuguugcaacaauagcuaaaaaucguaauuuacacucuccaauguacugcuucauaugcugcuuagcauuaucagaccuucuaguaucagguucaaauguacuagaaacagcaguaauacuuuuauuagaagcaggagcauuaguagcaagagcagcaguacuacaacaauuagauaauguuauagacguuauaacauguucaucaauguuaucaucacuauguuucuuaggagcaauagcaguagauagauauauaucuauauuuuaugcucuacgcuaucauucaauaguaacauuaccaugggcucguagagcaguagcagccaucuggguagcaucagucguauuuucaacacucuuuauagcuuacuaugaucauguagcaguauuauuaugucucguuguuuucuuucucgcaaugcuuguauuaauggcaguauuauauguacauauguuagccagagcaugccaacaugcucaaggaauagcaagauuacauaaacgucaaagaccaguucaucaaggauuuggacuaaaaggugcuguuacccuaacaauauuacuaggaauauucuuuuuauguuggggaccauucuuucuacauuuaacacuuauaguacuauguccagaacaucccacauguggaugcauauuuaaaaauuuuaauuuauuucuagcuuuaauaauauguaaugcaauaauagauccacuaauauacgcauuucauucccaagaauuaagacgaacacucaaagaaguauuaacauguucaugguaa

SEQ ID NO: 3866 - RNA, 954 nt, Artificial Sequence
  AHC11794 variant
auggcaguacaagguucacaaagaagacuauuaggaucauuaaauucaacaccaacagcaauaccacaacucggucuagcagcaaaucaaacuggugcaagauguuuagaaguaucaauuucagacggauuauuucuauccuuaggauuaguaucauuaguagaaaaugcauuaguaguagcuacaauagccaaaaaccguaacuuacacucuccaauguauugcuucauauguuguuuagcucuaucagacuuauuaguaucaggauccaauguacucgaaacugcaguaauuuuauuauuagaagcaggagcauuaguugccagagcagccguauuacaacaacuagauaauguuauagaugucauuacauguucaucaaugcuaucaucauuaugcuuuuuaggagccauagccguagauagauauauaucaauauuuuaugcauuaagauaucacucaauaguaacauuaccuagagcucguagagcaguugcagcaauuuggguagcaucaguaguauuuucuacacuauucauagcauauuaugaccauguagccguacuacuauguuuaguaguauuuuucuuagcaaugcuaguuuuaauggcaguccuauauguacauauguuagcuagagcaugucaacacgcccaaggaaucgcacgucuacauaaaagacaaagacccguacaucaaggauuuggauuaaaaggagcaguaacacuuacaauauuacuuggaauauuuuuccuauguuggggcccauucuuucuccauuuaacauuaauaguauuauguccagaacacccugaaugugguuguauauuuaaaaacuuuaauuuauuucuagcauuaauaauuuguaacgcaauaauagacccacuaauauaugcauuccacucacaagaauuaagacgaaccuuaaaagaaguauuaaccuguuccugguaa

SEQ ID NO: 3867 - RNA, 954 nt, Artificial Sequence
  AHC10874 variant
auggcaguacaaggaucccaaagaagauuauuaggaucauuaaacucaacaccaacagcaauaccacaacuaggacuagcagcaaaucaaacaggagcaagaugcuuagaagucuccauauccgacggucuauuccuaucccuaggauuaguaucauuaguugaaaacgcccuaguaguagcaacaauagccaaaaacagaaauuuacacucaccaauguacuguuuuauaugcuguuuagcauuaucagaacuauuagucuccggcucaaauguacuagaaacagcaguaauauuauuacuagaagcaggagcccuaguagcaagagcagcaguucuacaacaauuagauaacguaauagacguaauaacaugcuccucaaugcuuucaucacuauguuuucuaggagcaauagcaguagacagauauauaucaauuuucuacgcacuacgauaccacucaauaguaacauuaccucgagcacguagagcaguagcagcaauauggguagcauccguaguauucucaacauuauucaucgcauauuacgaccacguagcaguucuacuaugcuuaguaguauuuuucuuagcaaugcuaguauuaauggcaguuuuauacguucauauguuagcaagagcaugucaacacgcacaaggcauagcaagauuacacaaaagacaacgaccaguacaccaaggcuucggacuaaaaggcgcaguaacauuaacaauauuacuuggaauauucuuccuaugcuggggaccauucuuucuacacuuaacacuaauaguauuaugcccagaacacccaacaugcgguuguauauuuaaaaacuuuaacuuauucuuagcauuaauaauauguaacgcuauaauagauccuuuaauauaugccuuucacucacaagaauuacgaagaacucuaaaagaaguacuaaccugcucaugguaa

SEQ ID NO: 3868 - RNA, 954 nt, Artificial Sequence
  AHC09597 variant
auggcaguacaaggcucucaaagaagauuauuaggaucacuaaacucuaccccaacagcaauaccacaauuaggacuagcagcaaaccaaacuggagcaagauguuuagaaguaucaauuucagacggucuuuuucuaucauuaggacuuguaucuuuaguugaaaaugcauuaguaguagcaacaaucgccaaaaacagaaaucuucauucaccaauguacuguuuuauuuguugucuagcauuaucagaucuccuaguuuccggaucaaauguacuagaaacugcaguaauauuauuacuugaagccggugcauuaguagcaagagcagcaguauuacaacaauuagacaauguaauugauguuauaacauguucaucuaugcuaucaucccuuugcuuuuuaggagcaauugccguugauagauacauaucaauauuuuaugcuuuauguuaccauucaauaguuacacuacccagagcaagacgagcaguagcagccauauggguagcaucaguaguuuucucuacccuauucauagcuuauuaugaucauguugcaguauuauuauguuuaguaguauucuuuuuagcaauguuaguauuaauggcaguacuauauguucauaugcuagccagagcaugucaacaugcacaaggaauagcaagacuacauaaaagacaacgaccaguacaucaaggauuuggucuuaaaggagccgucacauuaacaauauuauuaggaaucuucuuuuuauguugggguccauucuuuuuacauuuaacacuaauaguuuuauguccugaacaucccacauguggauguauuuuuaaaaauuuuaaucuauuuuuagcauuaauaauauguaacgcaauaauagauccauuaauauaugcauuucauucucaagaauuaagaagaacauuaaaagaaguacuuacauguucaugguaa

SEQ ID NO: 3869 - RNA, 1665 nt, Artificial Sequence
  CCDS816.1 variant
augacugccccaggagcagcaggacguuguccuccaacaacauggcuaggaucacuuuuauuauuagucugucuacuagcaucacguucuauuacagaagaaguuucagaauauugcucucauaugauaggaucuggacaucuccaaucacuacaaagauuaauagacucacaaauggaaaccucuugucaaauaacauucgaauuuguggaccaagaacaacuaaaagacccaguuuguuaccuaaaaaaggcuuuucuauuaguacaagacauaauggaagauaccaugcgauuuagggauaacacaccgaaugccauagcaauaguacaauuacaagaauuaucacuaagacuaaaauccuguuucaccaaagauuaugaagaacaugauaaagcaugcguaagaaccuuuuaugaaacaccucuacaacuacuagaaaaaguaaaaaacguuuuuaaugaaaccaaaaacuuauuagauaaagacuggaacauuuuuuccaaaaauugcaauaauucauuugccgaauguuccucacaagaugucguaacuaaacccgauuguaauugucucuauccaaaagccauaccaagcuccgacccagccucgguaucaccacaccaaccacuagcuccuucuauggcucccguagcaggucuaacaugggaagacuccgaagguacggaaggaucaucacuacucccaggagaacaaccacuucauacaguagacccaggaucagcaaaacaacguccaccccgaucuacaugucaaucuuucgaaccaccugaaacaccuguaguaaaagacucaacaauaggaggaucuccacaaccacgccccaguguaggugccuuuaaccccggcauggaagacauacuagacucagccaugggaacaaauuggguacccgaagaagcuucuggcgaagcaucugaaaucccuguuccacaaggaacagaauuaucaccaucgagacccggcggaggaucaaugcaaacugaaccagcaagaccaaguaacuuccuaagcgcaucaucuccacuuccagccucugcaaaaggacaacaaccagcagauguaacaggaacugcauuaccucgaguuggaccaguaagaccaacaggacaagauuggaaccauacuccucaaaaaacugaucaucccuccgccuuauuaagagacccaccagaaccaggcucaccuagaauaucaucuuuacguccucaaggacuaucuaacccauccacccuaucagcacaaccacaauuaucucgcucucacucuucaggaucaguacuaccauuaggagaauuagaaggaagaagauccacaagagaucguagaucaccugcagaaccagaagguggaccagcuuccgaaggcgcagcaagaccacuuccaagauucaauucuguaccacuuacagauacuggccacgaacgacaaucagaaggaucauucucaccacaacuucaagaaaguguuuuccacuuacuaguaccaucuguaauccuaguauuauuagcaguaggaggauuauuauuuuauagauggagacgaagaagucaccaagaaccacaacgagcagauagcccacuugaacaaccagaggguucaccauuaacacaagacgauagacaaguagaauuaccaguauaa

SEQ ID NO: 3870 - RNA, 1893 nt, Artificial Sequence
  EAW85719 variant
auggcacugccaacugcaagaccacuuuuaggaucauguggaacaccagcacuaggaagccuuuuauuuuuauuauuuucucuaggauggguacaaccaucaagaacacuagcaggugaaacaggacaagaagccgcaccucuggaugguguauuagccaauccaccaaauauaagcucauuauccccacgacaauuacucggauuuccaugugcugaaguaucaggauuaucuacugagagaguacgugaauuagcaguugcacuugcccaaaaaaauguaaaauuaaguacugaacaacuaagaugcuuagcucacagacuaagugaaccaccggaagauuuagaugcauugcccuuagacuuacuccuauuuuuaaauccagaugcuuucucaggcccacaagcuuguacaagauucuucuccagaauaaccaaagccaacguagacuuacucccuagaggcgcgccugaaagacaacgauuauuacccgccgcauuagccugcuggggagucagaggaucauuacuaucagaagcagaugucagagcuuuaggaggauuagccugugauuuaccaggaagguuugucgcagaaucagcugaaguuuuacuaccccgacuugucucauguccuggaccuuuagaucaagaucaacaagaagcagcuagagcagcauuacaaggaggaggaccuccauaugguccacccucaacauggagcguaaguacaauggaugcccuaagaggacuguugccaguuuuaggacaacccauaauaagauccauaccacaaggaauaguugcagcauggagacaaagaucuucaagagacccaucauggcgacaaccagaacguacaauucuaagaccaagauuccgaagagaaguagaaaaaacagccuguccaucugguaaaaaagcacgagaaauagaugaaagucucauauucuauaaaaaaugggaauuagaagcauguguagaugcugcacuauuagcuacacaaauggauagaguaaacgcaauaccauucacauaugaacaacuugacguauuaaaacauaaauuggacgaacucuauccacaaggcuauccagaauccguaauccaacaucucggauaccucuuucucaaaaugucaccugaagacauacgaaaauggaacguaacuucauuagaaacauuaaaagcacuauuagaaguaaauaaggggcacgaaaugucaccacaagcaccaagaagaccauuaccucaaguugcaacacuaauagaccgcuuugucaaaggaagaggccaauuagauaaagauacauuagacacauuaaccgcauucuacccugguuaucuuugcucacucucaccagaagaacuaucuagcguacccccaagcuccauaugggccguacgaccacaagauuuagauacaugugacccuagacaacuagauguacucuauccaaaagcuagacuugcauuccagaauaugaauggaucugaauauuucgucaaaauacaaucuuucuuaggcggugccccaacugaagaucucaaagcauugucacaacaaaauguaucaauggaucuugccacauuuaugaaacuaagaacugaugcaguuuuaccucuaacuguugcagaaguucaaaaacuauuagguccacacguagaaggauuaaaagcugaagaacgacauagaccaguuagagauuggauucuacgucaacgucaagaugaccuagacacauuaggacugggacuacaaggugguauuccaaauggauaccuuguauuagacuuaucaaugcaagaagcucuuucaggaacaccaugucucuuaggcccaggaccuguauuaaccguguuagcacuuuuacucgcaucgacccuagcauaa

SEQ ID NO: 3871 - RNA, 1515 nt, Artificial Sequence
  CCDS46865.1 variant
auggaagcuuuaagaguacaaauguucaugccuugcucguucgaaagucuauaccuuucaucagcagaacacccaggagcaucaaaaccaccaaucucaagcagcaguaugaccucaagaauccuacuacgccaacaacuaaugagagaacaaaugcaagaacaagaaagacgugaacaacaacaaaaacuucaagccgcacaauuuaugcaacaaagaguccccgucucccaaacacccgcaauaaacguaagcgucccaacuacauuaccaucugcaacucaaguaccaauggaaguacuaaaaguccaaacacaccuagaaaauccaacuaaauaccauauacaacaagcacaacgacaacaaguaaaacaauaccuaucaacaacacuagcaaauaaacaugccaaccaaguauuaucuuuaccaugccccaaucaacccggagaccacguaaugccaccaguaccagguagcucagcaccaaauucaccuauggcaauguuaacgcuaaacucaaauugcgaaaaagaaggauucuacaaauuugaagaacaaaacagagcagaaagugaaugccccggaaugaacacccacagcagagcuucaugcaugcaaauggaugacguaauagaugacauaauuucccuagaaaguaguuacaacgaagaaauacuaggauuaauggacccugcacuacaaauggcaaacacauuaccaguauccggaaaucuaaucgauuuauacggaaaucaagggcuaccucccccaggacuaacaauaucaaacucuugcccagcaaaccuuccaaauauaaaacgagaacuaaccgaaagcgaagcacgagcacuagcuaaagaaagacaaaaaaaagacaaccacaauuuaaucgaaagaagacguagauucaacauuaaugaccgaauuaaagaauuaggcacacuaauaccaaaaucaaacgauccagacaugagauggaacaaaggcacaauacucaaagcauccguagauuauauaagaaaacuccaaagagaacaacaacgcgccaaagaacuagaaaaccgacagaaaaaauuagaacacgcaaauagacauuuauuacuaagaauacaagaacuagaaaugcaagcaagagcacacggucuaucacuaauaccaucaacaggacuauguucgccagacuuaguaaacagaauaauaaaacaagaaccaguccuagaaaacuguucucaagaccuacuacaacaccacgccgaucuaacaugcacaaccacucuggaccuuacagacggaacaauaaccuuuaacaacaaucuaggcacaggaacagaagcuaaccaagcauacaguguaccaacaaaaaugggaaguaaacuugaagacaucuuaauggacgauacacucucaccaguaggcguaacagacccccuacuauccaguguaucaccaggagcaagcaaaacauccucacgaagaucaucaaugucgauggaagaaacagaacacacuugcuaa

SEQ ID NO: 3872 - RNA, 1260 nt, Artificial Sequence
  CCDS2913.1 variant
augcuagaaauguuagaauacaaucacuaccaaguacaaacccaccuugaaaacccaacaaaauaucacauacaacaagcacaaagacaacaagucaaacaauacuuauccacaacacuggccaauaaacaugcaaaccaaguacuaucauuaccaugcccuaaccaaccaggagaccacguaaugcccccaguaccaggaucaucagcaccaaacucaccaauggcaaugcuaacacuaaauagcaacugcgaaaaagaaggauucuauaaauuugaagaacaaaacagagccgaauccgaaugcccuggaaugaacacccauucaagagcaucauguaugcaaauggacgacguaauagacgauauaauuucccucgaauccucuuacaacgaagaaauacucggacuuauggacccugcacuacaaauggcaaauacacuaccagucagcggcaaccuaauagauuuauauggaaaccaaggacuaccaccaccaggacuaacaauaucaaauucaugcccagcaaacuuacccaacaucaaaagagaauuaacagcauguauauucccaacagaaagugaagcaagagcccuagcuaaagaacgacaaaaaaaagauaaucacaaucuaaucgaacgaagacgcagauucaacauaaacgacagaauaaaagaacuaggcacauuaauccccaaaagcaacgacccagacaugagauggaacaaagguacaauauuaaaagcaucugucgacuacauaagaaaacuccaaagagaacaacaaagggccaaagaacucgaaaauagacagaaaaaauuagaacacgcaaacagacaccuacuacuaagaauacaagaacuagaaaugcaagcaagagcacacggccuaucacucauaccaagcacaggacuaugcucaccagaccuaguaaauagaauaauaaaacaagaaccaguacuagaaaacugcagccaagaucuacuacaacaucaugcagaccuaacuugcacuacaacacuagaucuaaccgacggaaccauaacauucaacaacaaucuaggaaccggaacagaagcaaaccaagcauacuccguaccaacaaaaauggguucaaaauuagaagacauacuaauggaugacacccuaucaccaguaggaguaacagacccacuacuaucaucaguaucaccuggcgcauccaaaacaucauccagacgaucaucaaugagcauggaagaaacagaacauacaugcuag

SEQ ID NO: 3873 - RNA, 1581 nt, Artificial Sequence
  XM_005264754 variant
augcaaucagaaagcggcauaguacccgauuucgaaguaggagaagaauuccacgaagaacccaaaaccuacuacgaacuaaaaucacaaccacuaaaaucuagcucuucagcagaacaucccggugcaaguaaaccaccaaucuccuccucauccaugacaucacgaauauuacuaagacaacaauuaaugcgcgaacaaaugcaagaacaagagagaagagaacaacaacaaaaacuacaagccgcacaauuuaugcaacaaagaguaccaguaucacaaacaccagccaucaauguaucaguaccaaccacccuacccucugcaacucaaguaccaauggaagucuuaaaaguacaaacccacuuagaaaacccaacaaaauaccacauacaacaagcacaacgccaacaaguaaaacaauaucuaucaaccacauuagccaacaaacaugcaaaccaaguacucucccuacccugcccaaaccaaccaggagaccacgucaugccaccaguaccaggaucaagugcuccaaacucaccaauggcaaugcucacccuaaacuccaauugcgaaaaagaaggauuuuauaaauucgaagaacaaaacagagcagaauccgaaugucccggaaugaauacacacuccagagcaaguuguaugcaaauggacgaugucaucgacgacauaauaucacuagaaucaucuuauaaugaagaaauauuaggacuaauggacccagcacuacaaauggcaaacacacuuccaguaucaggaaaccucauagaccuauauggaaaccaaggacuccccccaccaggccuuacaauaucuaacucaugcccagcaaaccuuccaaauauuaaacgagaacuuacagcauguauauucccaacagaaucugaagcaagagcucucgcaaaagaacgacaaaaaaaagacaaccauaaccuaauagaacguagacgaagauuuaauaucaacgaccgaauaaaagaauuaggaacacuaauaccaaaaucuaacgaccccgauaugcgauggaacaaaggaacaaucuuaaaagcuuccguagauuacauccguaaacuacaaagagaacaacaacgagcaaaagaacuagaaaacagacaaaaaaaacuagaacacgcaaauagacacuuauuauuaagaauacaagaacucgaaaugcaagcaagagcccacggauuaucauuaauuccaucaacaggacuaugcuccccagaccuugucaauagaauaauaaaacaagaaccaguacucgaaaacugcucucaagaccuacuccaacaccacgccgaccucacauguacaaccacauuagaccuaacagauggaacaauuacauucaacaacaacuuaggaacaggcacagaagcaaaucaagcauacuccguaccaaccaaaaugggauccaaacuagaagacauacucauggaugacaccuuaucaccugucggagucacagauccauuauuauccucaguaucuccaggagcaucaaaaacaucaagcagacgauccucaaugucaauggaagaaacagaacacacauguuaa

SEQ ID NO: 3874 - RNA, 1065 nt, Artificial Sequence
  BAG52140 variant
auggcaccagcagcuugguuacgaagugcagcagcaagagcacuucuaccaccuauguuauuacuauuacuacaaccaccaccacuacuagcaagagcauuaccaccagauguccaccacuuacaugcagaaagaagaggaccacaaccuuggcacgcagcauuaccaaguucucccgcaccagccccagcaacacaagaagcaccaagaccagcaucaucauuaagacccccuagauguggaguaccagauccuucagauggauuaucagcaagaaaucgacaaaaacgaauauuaagauuuccauggcaauuaguacaagaacaaguaagacaaacaauggcagaagcacuaaaaguauggucagacguuacuccuuuaacauuuaccgaaguacaugaaggcagagcagauauaaugauagauuuugcaagauacuggcauggagaugaucuuccauuugaugguccuggagguauauuagcacaugcauucuuuccaaaaacucauagagaaggagauguucauuuugauuaugaugaaaccuggacaaucggugaugaucaaggaacagauuuauuacaaguagcagcccaugaauuuggacauguacuagguuuacaacauaccacugcagcaaaagcauuaaugucagcuuuuuauacauuuagauacccauuaucauuaucaccugaugauuguagaggaguacaacaucuuuauggacaaccauggccuacaguuacaucaagaacaccagcauuaggaccucaagcaggaauugauacaaacgaaauagcaccauuagaaccugacgcaccuccagaugcaugugaagccucauuugaugcaguaaguacuauaagaggagaauuauuuuucuuuaaagcaggauuuguauggagauuaagaggaggacaauuacaaccagguuauccugcauuagcaucacgacacuggcaaggacuaccuucaccaguagaugcagcauuugaagacgcccaaggucacauaugguuuuuccaagguacaacagguguaucaacaccagcaccugguguauaa

SEQ ID NO: 3875 - RNA, 804 nt, Artificial Sequence
  AAV40839 variant
augagauuaacaguacuaugugcaguaugccuauuaccaggaucauuagcauuaccauuaccacaagaagcaggaggaaugucagaacuacaaugggaacaagcacaagacuaccuaaaaagauucuaccuauaugacucagaaacaaaaaacgcaaacucacuagaagcaaaacuaaaagaaaugcaaaaauuuuucggauuaccaauaacagguauguuaaauagcagaguuauagaaauaaugcaaaaaccaagaugcggaguaccagacguagccgaauacucauuauuuccaaacucaccaaaauggacaaguaaaguuguaacauacagaauaguaucauacacacgagacuuaccacacauaacaguagacagacuaguaucaaaagcauuaaacauguggggaaaagaaauaccauuacacuuuagaaaagucgucuggggaacagcagacauaaugaucggauucgcaagaggcgcacacggagacucauaucccuucgacggaccaggaaacacacuagcacacgcauuugcaccaggaacaggauuaggaggagacgcccauuucgacgaagacgaaagauggacagacggaucaagucuaggaauaaauuucuuauacgcagcaacacaugaauuaggacacagucuaggaaugggacacucaagugacccaaacgcaguaauguacccaacauacggaaacggagauccacaaaauuucaaacucagucaagacgacauaaaaggaauacaaaaacuauacggaaaaagaucaaacagccgaaaaaaauaa

SEQ ID NO: 3876 - RNA, 3768 nt, Artificial Sequence
  J05582.1 variant
augaccccuggaacucaaucuccguuuuucuuacuucuacuacuaacaguccucacugugguuacuggcucaggacacgcaagcuccacuccaggcggagaaaaagaaacaucagccacacaacgaaguuccguaccaucaucaacagagaaaaaugcagugaguaugacaucuucuguauuaagcucacauucacccgguaguggcagcucuacuacacaaggucaagauguuacuuuagcaccagcgaccgaacccgccagcgguagcgcagcaacauggggucaagauguuaccaguguucccguuacacgucccgccuuaggcucaaccaccccaccagcucacgauguaaccucagcacccgauaauaaaccagcuccagggaguacugcaccacccgcacauggaguaacaucugcacccgauacgagacccgcaccaggauccaccgcuccuccugcucacggaguuacuucugccccugauacaagaccagcuccaggaagcacagcaccacccgcacacgguguaacauccgcaccagacacccgcccagccccagguucaaccgcacccccugcucauggagucacaagugccccagacacaagaccagcuccaggcucuacggcuccuccugcccacggaguuaccucagcgccagauacccgaccugcuccugguagcaccgccccuccagcucauggaguuacaucugcaccagauacuagaccggcaccugguucaacggcacccccugcacauggcguaacauccgcaccagauaccagaccugcuccuggaucaacagcucccccugcacacggagucacaucggccccugacacgagaccagcaccuggaucuacagccccuccagcacauggaguuacuuccgcuccugacacaagaccagcaccaggcaguaccgcgccgccagcgcaugguguuacaucagcucccgauacacgacccgcaccaggcucuacagcaccacccgcacacgguguaaccucagcuccugauacgagaccagcucccggaaguacugcgccacccgcucacgggguaacaucagccccugacacaagaccagcuccaggaucuacugcacccccugcucauggaguaacuucagcuccagauaccagacccgcaccuggcucaaccgcacccccugcacacggugucacaucugccccugacacuagaccugcuccaggaagcacagcaccaccagcucacgguguaacaucagcuccagauacucgaccugcaccuggaaguacagcaccuccugcccacggcguaacuucagcaccugauacucgacccgcgcccgguaguaccgcacccccugcccacggcgugacuuccgcacccgauacucgaccugcaccuggcucuacagccccaccagcgcauggaguaaccucugcucccgauacucgcccugcuccagguucuacagccccacccgcucacggaguuacaucugcaccagauacucgacccgccccuggaucaacagccccacccgcccauggugucacaagugcaccagauacgcguccugcaccaggaucaaccgcaccgccugcacacgguguaacaagcgcaccugacacuagaccugcaccuggaucaacagcuccgccggcucauggaguuacaucugcaccugauacucgcccugcucccggcuccacagcaccuccagcccauggagucacuuccgcuccugauacaagaccagcaccaggaucaacugcaccuccagcccaugguguaaccagcgcaccagacaccagacccgcaccuggaucaaccgcaccucccgcucauggaguaaccuccgcuccugauacaaggcccgcuccaggaaguacagcuccuccagcucauggaguaacaagcgcacccgauacuagaccagcucccggcuccacugccccuccagcucacggcguaacaagcgcuccugacacuaggccugcacccggcucaaccgcuccgccagcgcacgguguuacuucugccccagauacccgaccagcaccugguagcacggccccuccagcucaugguguaacaucagcccccgauaccagaccagcacccggauccaccgccccuccagcgcacggagucacaucagcuccagauacacgcccugcaccagguucuacagcaccacccgcacauggugucacaucagcuccagacacccguccugcuccuggcucuacugcaccaccagcucacggcgucacaagcgcaccugacacacgaccugcuccaggcuccacugcucccccagcacacggaguaacaucugcgccugacacuagacccgcccccgguucaacagcaccuccagcacacggggucacaucagcacccgacaccagaccagcaccagguaguacagcaccucccgcucauggaguaacuucagcaccugauacuagacccgcuccaggcuccacagcaccuccagcccauggcguaaccucugcucccgauacuagaccagcaccaggcucuaccgcaccuccagcgcacggcguuacuucagcaccagauacaagaccagcaccuggaucuacagcaccacccgcucacgguguaacaucagcaccugacacacgaccugcaccugguuccacugcaccaccagcccacgguguaacaucagcaccagacacaaggccugcaccggguucuacagcaccucccgcacacggaguaacaagcgcaccagacacaagaccggcaccuggaucuaccgcaccuccagcacauggaguaacuucagccccagauaauagacccgcacuagguuccacugcaccacccguacauaauguuacaagcgcaagcggaagugcaucagguagugcuucgacuuuaguacauaauggcaccagugcacgcgcaacuaccacaccagccuccaaaucaacaccauuuuccauaccuucccaccauucugauacuccaaccacacuugcaucccauucgacuaaaacagaugcuucuucuacucaccauaguuccguuccaccucuuacaucgucaaaucacuccaccaguccccaacuuucgacugguguuucuuucuucuuuuuauccuuucacauuucaaauuuacaauuuaacucaagucuugaagauccuuccacagacuauuaccaagaacuucaacgagauauauccgaaauguuucuucaaauuuauaaacagggaggauuucuuggacuaucuaauauaaaauuucguccuggcucaguuguuguccaguuaacuuuagcuuuucgagaaggaacuauaaacguucacgauguugaaacccaauucaaucaguauaaaaccgaagcagcuucucgcuauaacuuaaccauaucagacguaucuguuucagacguaccauuuccuuucuccgcacagucuggugccggaguuccaggcuggggaauugcucuauuaguacucgucuguguucucguugcucuagcaauuguauauuuaauugcacuagcaguuugucaauguagaaggaaaaacuacggucaacuagauaucuucccugcucgagauaccuaucacccaaugucagaauaucccacuuaccacacucacggaagauauguaccuccgucuucuaccgaccgcucuccauaugaaaagguauccgccggaaacggaggaucaucuuuaaguuacacaaauccugcuguagcugcugcaucugcaaaucuguaa

SEQ ID NO: 3877 - RNA, 2136 nt, Artificial Sequence
  NM_032853 variant
augauggcagaugcaaaauauguacucugucgaugggaaaaacgauuauggccagccaaaguacucgccagaacagcaacaucaacuaaaaauaaacgucgaaaagaauacuuuuuagcaguccaaauacuaagccuugaggagaaaauaaaaguaaaaucaaccgaaguagaaauauuagaaaaaucacaaauagaagccauugcaagcagccuugcaagccaaaaugaaguuccagcagcacccuuggaagaauuagcauauagaagaucucuaagaguugcucuagauguauuaucagaaggaucaaucuggagccaagaaucaucggcagguacagguagagcagacagaaguuuaagaggaaaaccuauggaacacgucaguuccccuugcgauucaaauaguagcagucuaccgagaggugauguuuuagguaguucacgaccacacagaagacgaccuugcguacaacaaagccuaucuucgucuuuuacuugcgaaaaagauccagaauguaaaguagaucacaagaaaggacuuagaaaaucagaaaauccuaggggaccauuaguauuaccagccggugguggggcacaagacgaaagugggucaagaauccaccacaaaaacuggacuuuagcaucaaaacgaggaggaaauucagcacaaaaagcaucucuaugucuaaaugguucgucauuaagugaagaugauacugaacgagacaugggaucaaaaggcggauccugggcagcaccaagccuaccuucaggaguaagagaagaugauccaugcgcaaacgcugaaggacaugacccaggacuaccauuaggaucauuaacugccccaccggcaccugaaccaucagcauguagugaaccaggcgaauguccagcaaagaaaagacccagguuagauggaucccaaagaccacccgcaguacaauuagaaccaauggcagcaggagccgcaccuaguccagggccagguccaggaccaagggaaagcgucacuccacgaucaacggcaagacuaggaccacccccaucgcacgcgucugcagaugcaaccagaugcuuacccugccccgacucucaaaaauuggaaaaagaaugccaaucuucagaagagucuauggguaguaauucaaugagaucaauauuggaagaagaugaagaagaugaagaaccaccacguguacuacuauaucacgaaccaagguccuuugaaguuggcaugcuaguauggcauaaacauaagaaauauccuuuuuggcccgcuguaguaaaaucaguucgacaaagagacaagaaagcaucaguauuauauauagaaggacauaugaauccaaaaaugaaaggauucacaguuaguuuaaaaucuuuaaaacauuuugacuguaaagaaaaacaaacacuguuaaaucaagcacgagaagauuucaaucaagacauaggauggugcguuagcuuaauaacugacuauagaguaagauuaggcuguggaucauuugcuggaucuuuucuugaauauuaugcugccgauauaagcuauccaguaaggaaaucaauucaacaagacguuuuaggaacaaaauuaccacaauuaaguaaaggaagucccgaggaaccaguaguagguuguccucuaggucaaagacagccaugucgaaaaauguuacccgaccgcaguagagcagccagagacagagcaaaucaaaaauuaguagaauauauaguuaaagcaaaaggcgcagaaucacauuuaagagcgauauugaaaucuagaaaaccgaguagaugguuacaaacauucuuaaguucaagccaauacguaacauguguagaaacuuaucuagaagacgaaggucaacuagaucuagugguaaaauaccuacagggaguuuaucaagagguuggcgcaaaaguauuacaaagaacaaauggcgacagaauacguuucauauuagauguuuuauugccggaagcaauaauaugcgcaauaagcgcagucgaugaaguugauuauaaaacugcugaagaaaaauauauuaaaggacccagcuuaucauacagagaaaaagaaauauucgauaaucaacuccuugaagaacgaaacagaagaagacgauga

SEQ ID NO: 3878 - RNA, 438 nt, Artificial Sequence
  AAD44697 variant
augacaguacacaaccuauaccuauucgacagaaacggaguaugccuacacuacucagaauggcacagaaaaaaacaagcaggaauaccaaaagaagaagaauacaaacuaauguacggaaugcuauucucaauaagaucauucgucucaaaaaugucaccauuagacaugaaagacggauuccuagcauuccaaacaucaagauacaaauuacacuacuacgaaacaccaacaggaauaaaaguaguaaugaacacagaccuaggaguaggaccaauaagagacguacuacaccacauauacucagcauuauacguagaacuaguaguaaaaaacccacuaugcccacuaggacaaacaguacaaucagaacuauucagaucaagacuagacucauacguaagaucauuaccauucuucucagcaagagcaggauaa

SEQ ID NO: 3879 - RNA, 1395 nt, Artificial Sequence
  AAH02712 variant
augcccaguuguucaacaucaaccaugccaggaaugauauguaaaaaccccgaucuagaauuugacaguuuacaacccuguuuuuacccagacgaagacgauuucuauuucggagguccugauaguacaccaccuggagaagacauauggaaaaaguuugaauuauuaccaacaccaccauuaaguccaagcagaggauuugcagaacauagcucagaaccuccaucauggguaacagaaaugcuauuggaaaaugaacuaugggguagcccugcagaagaagaugcauuuggguugggcggacuaggaggacuuacaccaaauccagucauacuacaagacuguauguggagcggauuuagugcuagagaaaaauuagaaagagcagugagcgaaaaauuacaacauggacgaggaccaccaacagcagguaguacugcacaaaguccuggagcaggagcagcaucaccagcaggaaggggacauggaggagcagcaggagcaggaagagcaggugcagcauuaccugcagaauuagcccauccugcagccgaauguguugaucccgcaguaguauuuccauucccuguaaacaaaagagaaccagcaccaguaccagcugcaccagcaagcgccccugcagccggaccagccguagcaucaggcgcaggaauagcggcaccagcaggugcaccugguguggcaccaccaagaccaggaggaagacaaacaucaggaggagaucauaaagcauuaaguacaaguggagaagauaccuuaagugauagugacgaugaagaugacgaagaagaagaugaagaagaagaaauagacguaguuacaguagagaaacgaagaaguucaaguaauaccaaagcaguaacaacauuuacuauaacaguaagaccaaaaaaugcagccuuaggaccugggagagcacaaucuagugaauuaauacuuaaaagaugcuuaccaauacaucaacaacauaauuaugcugcuccaaguccauauguagaaagcgaagacgcaccgccacaaaaaaaaauaaaaucugaagcaucaccacgaccauuaaaauccguaauaccaccaaaagcuaaaagcuuaucaccaagaaacucagauagugaagauucagaaagaagaagaaaucauaauauacucgaaagacaaagaaggaaugaucuaagaucuucauuuuuaacauuaagggaucauguaccugaacuaguaaaaaacgaaaaagcagcaaaaguuguaauauuaaaaaaagcaacagaauauguacacucauuacaagcagaagaacaccaauuauuacuagaaaaagaaaaacuccaagcaagacaacaacaauuauuaaaaaaaauagaacaugcucgaacaugcuaa

SEQ ID NO: 3880 - RNA, 3132 nt, Artificial Sequence
  AAC78645 variant
augccacuacuggaaggaucaguuggaguagaagaucuaguccuucucgagccguuagucgaagaaucauuauuaaaaaaccuacaacuucgauaugaaaauaaagaaauauacaccuacauuggaaauguaguaauaucaguaaauccauaccagcaacuuccaauuuacggcccagaauuuauagcaaaauaucaagauuauacauuuuacgaauuaaaaccucauauauaugcuuuagcaaauguggccuaucaaagcuuacgagacagggaucgugaucaauguaucuuaauuacaggagagucaggaaguggaaaaacugaagcaucaaaauuaguaaugucuuauguagcagcaguauguggaaaaggagaacaaguaaauucgguaaaagaacaacuccuucaaucaaacccgguacuagaagcauucggaaaugcaaaaacaauacguaacaacaauucguccagauucgguaaauacauggauauagaauucgauuuuaaaggaucaccacuaggagguguaaucaccaacuauuuauuagaaaaaucaagacuuguaaaacaacugaaaggcgaaaggaauuuucacaucuuuuaucaacuauuagcaggagcggacgaacaguuauuaaaagcacucaaacuugaacgcgacacaacaggauaugcuuacuuaaaucaugagguaagccgaguagacggaauggacgaugcaagcuccuuucgagcagugcaaucggcaauggccguuauaggauucucagaagaagaaauaagacaaguccuagagguaacauccaugguauuaaaacuugggaauguacuuguagcggacgaguuccaagcaagcggaauaccagccuccgguauacgcgacggacgcggaguaagagaaauuggagaaauggugggacuuaauagugaagagguggaaagggcacuauguucaagaacaauggaaacagcaaaggaaaaagucguaacugcauuaaauguaaugcaggcacaauaugcgcgagaugcauuagcaaaaaauaucuacucacgacuauucgauuggauagucaauagaauuaaugaaucuaucaaaguuggaauuggagaaaaaaaaaaaguaaugggaguuuuagauaucuaugguuucgaaauauuagaagauaauagcuucgaacaauucguuauaaacuacuguaacgaaaaacuacaacaggucuucauugaaaugacccugaaagaagaacaagaagaauauaaaagagaaggaauaccauggacuaaaguggauuauuucgauaacggaaucauauguaaauuaaucgaacacaaucagagagggauacuugcaaugcuagacgaagaaugcuuaagacccgggguaguaucagacucaacauuuuuagcaaaauuaaaccaauuauuuucaaaacacggccauuaugaaucgaaaguaacccaaaacgcacaaagacaauaugaucauaccaugggauuaucauguuucagaauaugucacuaugccgggaaagugacauacaauguuacuucauucauagauaaaaauaaugauuuacuauuccgagaccuuuugcaagcaauguggaaagcacaacauccacuauuaagaucccuauucccugaaggaaauccaaaacaagcaagucuaaaacgaccaccaacagcaggagcacaauuuaagucuucuguagccauauuaaugaaaaaucuauacuccaaaagcccaaacuacauuagauguauuaaaccaaacgaacaccaacaaagaggacaguuuaguucagaucuggucgcgacccaagcuagauauuugggauuacuagaaaauguuagaguaagaagagcuggauacgcacauagacaaggguacggaccauucuuagaacgguacagauugcuaucccgaucaacauggccacauuggaacgggggcgaucgagaaggaguagagaaaguccuaggggaauuaagcaugucuagcggugaacuagcguucggaaaaacaaaaauauucaucagaaguccaaaaacacuauucuaccuagaagagcaaagaagauuaaggcugcaacaacuugcuacacuuauucagaaaauauaucgagguuggagaugcagaacacacuaccaacuuaugagaaaaagucaaauauugauaucaaguugguuucgcggcaauaugcaaaaaaaaugcuauggaaaaauuaaagccaguguacuacuaauacaagcauucguaagggguuggaaggcaagaaaaaauuaccgaaaauacuuccgcucagaagccgcacucacuuuagcagauuuuauauauaaaucaaugguacaaaaauuucuucuuggauuaaaaaacaacuugcccagcacaaauguacuugacaaaaccuggccagcugcaccauauaaaugccuaucaacagcuaaccaagaacugcaacaacuauucuaccaauggaaauguaagcgauucagagaucaauuaucuccuaaacaaguagaaauauugagggaaaaauuaugugcuagcgaauuguuuaaaggaaaaaaagcaucauacccgcaaucggugccgauaccuuucugcggagauuacauuggacuacaaggaaacccaaaauuacaaaaacuuaaaggaggagaagaggguccaguacuuauggcagaagcggucaaaaaaguaaacagaggcaacggaaaaacuucaucaagaauacuucuacuaacaaaaggccacguaauuuuaaccgacacaaaaaaaagucaagcaaaaauuguaauaggacucgauaacguagcggguguaagcguuacaucauuaaaagauggacuauuuucauuacaucuaucagaaaugagcagcguaggcucgaaaggugauuuucugcugguaucagaacacguuauagaacuuuuaacaaaaauguacagggcggugcuugaugcaacacaaagacaacuaacugucacagugacagaaaaauuuucaguucgguucaaagaaaauucaguagcaguaaaaguaguacaaggcccugccgguggagauaauucaaaacuaagguacaaaaaaaaaggaagccacuguuuagaaguaacaguucaauaa

SEQ ID NO: 3881 - RNA, 3411 nt, Artificial Sequence
  AAH53558 variant
auggcuaaaauggaaguuaaaacuucacuguuagauaacaugauuggaguaggcgauaugguacuucuagaaccuuuaaaugaagagacauuuaucaauaaucucaagaaaagauuugaucauucagaaauuuacacuuacauaggaucaguaguaauuucagucaacccauaccgcagucuuccuaucuacucuccagaaaaaguagaagaauacagaaauagaaauuuuuacgaauuaucaccacauauauucgcacuuucagaugaagccuauagaucucucagagaccaagauaaagaccaauguauacucauaacaggagaaagcggcgcuggaaaaaccgaggcuucaaagcuagucaugucauauguggcagccguaugugggaaaggcgcggaagucaaccaagugaaagaacaauuauuacaaucaaauccuguacuagaagccuuugguaaugcaaaaacaguacgaaacgauaauucaucacgauuugggaaauauauggauauagaauuugacuuuaaaggagauccacuaggcgguguaauuucaaauuacuuauuagaaaaaucacgagucguaaaacaaccacgaggagaacggaacuuucauguauucuaucaacuacuuagcggagcgucagaagaacuacuaaacaaacuaaaacuagaacgugauuuuucaagauauaauuaccuaucacuagacuccgcaaaagucaacggagucgacgaugcagcaaauuuccgaacaguccguaaugcaaugcaaauaguaggguuuauggaccaugaagcagaaaguguauuagcagugguugcugcuguccucaaacuaggaaauauugaauuuaaaccagaaagucgaguaaacggacuagacgaaucuaaaauaaaagauaaaaacgaauuaaaagaaauaugcgaauuaacaggcaucgaccaaucaguacuagaaagagccuucaguuucagaacaguggaagcaaaacaagaaaaaguaucuacuacauuaaauguagcccaagcguacuacgcaagagacgcccucgcgaaaaacuuauacaguagacuauuuucaugguugguaaacagaaucaacgaaagcauuaaagcacaaaccaaaguacgcaagaaagucaugggaguauuagauaucuacggcuucgaaauauucgaggauaacucauuugaacaauuuauuauaaacuacuguaaugaaaaacuacaacaaauauuuauagaauuaacucuaaaagaagaacaagaggaauacauacgagaagauauagaauggacucauauagauuauuuuaacaacgcaauaauuugcgaccugauagaaaauaacacaaacgguauauuagcaauguuagacgaagaaugccucagaccaggaaccguuaccgaugaaacauucuuagagaaauuaaaucaaguaugugcaacacaucaacacuucgaaucacgaaugaguaaauguagcagauuucucaaugauacaucauuaccgcauucguguuucagaauccaacauuaugcaggaaaaguucuauaccaaguagaaggauucgucgacaaaaacaacgaccuauuauacagagaucuaucacaagcaauguggaaagccagucaugcccuaauaaaaucacuauuucccgaaggaaauccugcgaaaauuaacuuaaaacgaccacccacagcuggaagucaauuuaaagcaucaguagccacauuaaugaaaaacuuacaaacgaaaaauccaaacuauauaagauguaucaaaccaaaugacaagaaagcugcacauauauucaacgaagcauuagucugccaccaaauuagauaucuaggucuucucgaaaauguaagaguucgcagagcugguuaugcauuuagacaagcauacgaaccaugucuagaacgauacaaaaugcucuguaaacaaacuuggccgcauuggaaagguccagcgagaucaggaguagaaguucuuuucaaugaauuagaaauccccguagaagaauauucauuuggcagauccaaaauauucauacgaaauccaagaacauuauucaaauuagaagaucuaaggaaacaaagauuagaagauuuggcaacuuugauacagaaaauauacagaggguggaaaugccguacacauuuccuccucaugaagaaaucacaaauuguaaucgcugcaugguauaggcgauaugcccaacaaaaacgauaccaacaaacuaaaucaagcgcauuaguaauacaaagcuauaucagagguuggaaagcaagaaaaauauuaagagaauuaaaacaccagaaaagauguaaagaagcaguaacgaccauugccgcauacuggcauggaacacaagccagacgugaacuuagaagauuaaaagaagaagcaagaaauaaacacgccaucgccgugauaugggcauacuggcugggcaguaaagcgcgacgagaacuaaaaagacuaaaagaagaagccagaagaaaacaugccguagcaguaauaugggccuauuggcuaggacuaaaaguaagaagagaauaucgaaaauucuuuagagcaaacgcuggaaagaagauauacgaguuuacucuucaaagaaucguucaaaaauacuucuuagaaaugaaaaauaaaaugccaucccuaucacccaucgauaaaaauuggccuucccgaccauauuuguucuuagacucaacccacaaagaacuaaagcguauuuuucaucuauggagaugcaagaaauaccgcgaucaauuuacagaucaacaaaaacuaauauaugaagaaaaacuagaagcgucagaacucuucaaagacaaaaaggcuuuauacccaagcagcguuggacaaccauuccaaggugcauaucuagaaaucaacaaaaacccaaaauauaagaaacucaaagacgcgaucgaagagaaaauaauaauagccgaaguaguaaacaaaauaaaccgcgcaaaugguaaaucaacaagccguaucuuucuuuuaacaaauaacaaccuauuauuagcagaucagaaaaguggucaaauaaaaagugaaguaccccuaguagacgucacgaaaguaagcaugaguucacaaaacgacggauucuucgcugugcaccucaaagagggaagugaagcagcuucaaaaggagacuuuuuauucucaucagaucauuuaauagagauggcaacuaaacuuuaucgaacaacauuaagucaaaccaaacaaaaauuaaauaucgaaaucagcgaugaguucuuaguccaauuucggcaagauaaaguaugcgucaaauucauucaaggaaaccagaaaaacggaagugucccaacauguaaaagaaagaauaaucgacuacuugaaguagccguacccuga

SEQ ID NO: 3882 - RNA, 3192 nt, Artificial Sequence
  CCDS42226.1 variant
auggcuuuacaagucgaauuaguaccaacaggagaaauaauuagaguaguacacccucacagaccuugcaaacuagcacuugggucagaugguguacguguaacaauggaauccgcacuaacggcaagagaucgcguagguguacaagauuuuguacuucuagagaacuuuacuucugaagcagccuuuaucgaaaaucuccgacggcgauuuagagaaaauuuaaucuauacauacauaggaccaguuuuaguaagcgucaauccauaccgcgaucuccaaauauauucaagacaacauauggaaagguaucgagggguaucuuuuuaugaaguacccccacaucuauuugcaguagcugauaccguauaucgcgcacuacgcacugaacgaagagaccaagcaguuaugauuucaggagaaaguggugcggggaaaacugaagcaacaaaaaggcuauuacaauuuuaugcagaaacauguccugcuccugaacgaggcggcgcaguccgugaccgccuucuccaaucaaacccuguauuagaagccuuuggcaaugcaaaaacucuaagaaaugauaauaguucaagauuuggaaaauauauggacguccaguuugauuuuaagggugcaccaguaggagggcacaucuuaucuuaucuccuugaaaaaucuagaguaguacaucaaaaccauggugaaagaaauuuccauauauuuuaucaacuucuagaagggggcgaagaagagacauuaagaagacuaggauuagaacguaacccacaauccuaucuguaucuaguaaaaggacaaugugccaaaguuucuaguauuaaugacaaaucagauuggaaaguaguucgcaaagcccuaacaguaauugacuucacagaagaugaaguagaagauuuacuaucuaucguagcuagcguacuacauuuaggaaacauccacuuugcagcaaaugaagagaguaacgcacaaguaacuacagagaaucaacuaaaauaucuaacuagauuacucagcguugagggaucaacacuaagagaagcucucacccacagaaaaauaauugcaaaaggagaagaguuauuaucaccauuaaaucucgaacaagcagcauacgcacgcgacgcauuagcgaaagccguauauagccgaacauuuacaugguugguaggcaaaauuaauagaagucucgccucaaaagauguagaaagccccucauggagaucaacuacaguauuaggacuauuagacaucuacggauucgaaguauuucaacauaacucauucgagcaguucuguaucaauuauuguaaugaaaaauuacaacaacuuuuuauugaacuaacauugaaaucagaacaagaagaauaugaggcagaagggauagcaugggaaccagugcaauauuucaacaauaaaauaauaugcgaucuaguagaagaaaaauucaaggguauuauaucaauacuagacgaagaaugucuacgcccgggcgaagcaaccgaucuaacauuuuuagaaaaauuagaagacacugucaaacaucauccacauuucuuaacacacaaacuugcagaccaacgcacaagaaaaucuuuaggacgcggagaauuuagguuacuacauuaugcaggagaaguaacuuacucaguuaccggauuuuuggauaaaaauaaugaucuccuauucagaaacuuaaaagaaacaaugugcuccaguaaaaacccaauaaugagccaauguuuugauagaucagaacugagcgauaagaaacggccggaaaccguggcaacacaauuuaaaaugucuuugcuccaauuaguagaaauauuacagagcaaagaaccugcauauguuagauguauaaaaccuaaugacgcaaaacaaccaggucgauucgaugaaguauuaauaaggcaucaaguaaaauauuuagggcuacuagaaaaucuacgcguuaggagagcaggauucgcauauagacgaaaauacgaggcuuuccugcaacgauacaaaucauuauguccagaaacauggccaacaugggcggguagaccacaagaugggguagcagugcucgugagacacuuaggauacaaaccagaagaauacaaaaugggacggacgaagauuuuuauccguuuuccaaaaacauuauuugccacagaagacgcauuagaaguacgucgacaaaguuuagcuacaaaaauacaagcggcauggagaggauuccacuggagacagaaauucuuaagaguuaaaagaucugcuauauguauucaaucuugguggcgagguacacucggaagaagaaaagcagcuaaaaggaagugggccgcucaaacaauuagacgacuaauuagaggguuuguauuaaggcaugcuccaagauguccugaaaacgcauucuuucuagaucacguucgcacuagcuuucuacuaaaccuacgaagacaacuaccgcaaaacguccuagauacaucauggccuacacccccaccggcccuaagggaagccagugaauugcuaagagagcuguguaucaaaaauaugguauggaaguauuguagaaguauauccccagaauggaaacaacaauuacaacagaaagcuguagcgucagaaauuuuuaaagguaagaaagauaacuauccccaaaguguuccaagacuguucauaagcacaagauuaggaacagacgaaauaucuccgcguguucuacaagcacucggaagcgaaccuauacaauaugcuguaccaguuguaaaauacgacagaaaaggauauaaaccucguucacgacaacuauuauuaacgcccaacgcugucguaauagucgaagaugcaaaaguaaaacaaaggaucgauuaugccaaccucacuggcaucucagugagcucacuuucagauucgcuuuuuguacuucauguucaaagggccgacaauaaacaaaaaggagacguuguauuacaaagugaccaugucauugaaacucugacuaaaacagcacuuucugcaaauagagucaauaguauaaauaucaaucaaggcucaauaacauucgcaggcgguccugguagagacggcacaaucgauuuuacacccggaucggaauuauuaauaacaaaagccaaaaacggucacuuagcaguuguagcacccagacuaaacucacgauaa

SEQ ID NO: 3883 - RNA, 3021 nt, Artificial Sequence
  AAI46764 variant
auggcugaacaagaaucguuagaguucgguaaagcagacuucguauuaauggacacagugucaaugcccgaauuuauggcaaaccucagacucagauucgaaaaaggaaggaucuacacauucauaggcgaaguuguuguauccguaaacccuuacaaacuacugaacauuuauggaagagauacaauugaacaauauaagggcagagaauuauacgaaagaccaccccaccuauuugccauagcagaugcagcauauaaagcaaugaaaagacgaagcaaagacacuugcaucguuauaucaggcgaaucgggagcaggaaaaacagaagcuaguaaauacauaaugcaauauauagcagcuauaacaaacccaagucagagagcagaaguagaacgaguuaaaaauaugcuucuaaaaucgaacuguguauuagaagcauucgguaaugcaaaaaccaauagaaaugacaacucaucaagauucggaaaauacauggacaucaacuucgauuuuaaaggugacccaaucggaggucacauuaauaacuaccuccuagaaaaaucaagaguaaucguacaacaacccggagaacgaucuuuccauuccuucuaccaacuacuacaaggaggcucugaacaaauguuaagaagucuacaccuacaaaaaucauuaucaucauacaacuauauacauguaggagcacaauuaaaaucaucaauuaaugacgcagcagaguuccgagucguagcagaugcaaugaaagugauagguuuuaaaccagaagaaauccaaacugucuacaaaauccuagcagcaauccuacaucuaggcaauuuaaaauucguagucgauggugauacccccuuaauugaaaauggcaaaguugucucaauaauagcagaacugcuuucuacaaaaacagauauggucgaaaaggcuuuacuuuacagaacagucgcaacagggagagacauuauugauaaacagcacacagaacaagaagccaguuauggacgagaugcauuugcuaaagcaauauacgagagacuauucugcuggauaguaacgcgaauuaacgauauuauugaaguuaaaaauuacgauaccacaauacacggcaaaaauacaguaauagguguacuugauauauacggauuugaaauauucgacaacaauucauuugaacaauuuuguauaaacuacugcaaugaaaaacuacaacaacuauuuauacaacuuguacuaaaacaagaacaagaagaauaucaaagagaaggaauaccguggaaacauauagauuacuuuaacaaucaaauuauagucgauuuaguagaacaacaacauaaaggaauaauugccauauuagaugacgcauguaugaauguagggaaaguaacagaugagauguuucuagaagcauuaaacagcaaauuaggcaaacacgcacauuuuagcagccgaaagcuaugugcauccgauaaaauccucgaauuugaucgagauuuccgaauacggcacuaugcuggcgacgucguguauucaguuauaggauuuauagacaaaaacaaagauacacuguuucaagacuuuaaaagacuaauguacaauucuagcaacccaguacuuaagaauauguggccugaagguaaacuaucaauaacagaaguaacaaaaaggccacuaacagcugcuacauuguuuaaaaauucaaugauagcccucguggacaacuuagcaucgaaagaaccauacuaugucagauguauuaaaccaaaugacaaaaagucaccucaaaucuucgacgaugaacgaugcagacaucaaguagaauaccuaggacuacuagagaacguucguguucguagagcugguuucgccuucagacaaaccuacgaaaaauuccuccacagauauaaaaugauaucagaauuuacauggcccaaucacgauuuaccaagcgacaaagaagccguaaagaaacuaauagaaagauguggcuuccaggaugauguugcauauggaaaaacaaaaauuuucauacgaacgccaagaacauuauucacauuagaagaauuaagggcacaaauguugauacgaauaguacucuuucuacaaaaaguuuggcgaggcacauuagcacgaaugagauacaaaagaacgaaagcagcacuaaccauaauacguuauuaucgaagauacaaagucaaauccuacauccaugaagucgcacgacgcuuccauggagugaaaacaaugagagacuauggcaaacacguuaaauggccuagcccaccaaaaguccuucgccgauuugaagaagcauuacaaacaauuuuuaaucguuggcgagcaagccagcuaauaaaaucaauaccagcaucugaccucccacaaguacgagcgaaagucgcagcaguagaaauguuaaaaggccaaagagcagaccuuggccuacaaagagccugggagggcaauuaccucgcauccaagccugacacuccacaaacaucugguacauucguuccuguagcaaacgaacuaaaacgcaaagauaaauacaugaacguauuguuuagcugccacgucagaaagguaaaccgauucucuaaaguagaagauagagccaucuuuguaacggauagacacuuauauaaaauggacccaacgaagcaauacaaaguaaugaaaacaauaccauuauauaacuuaacagguuuaucaguaucaaacggcaaagaucaacucguuguauuucauacuaaagauaacaaggacuuaauaguauguuuauucagcaaacaaccuacacaugaaucacgaaucggagaauuaguaggaguucuaguuaaucauuucaaauccgaaaaacgacaccuacaagucaacguaacuaauccagugcaaugcucauuacauggaaagaaauguacaguuaguguugaaacaagacuuaaccaaccucaaccugacuucacgaaaaacagaucaggauucauucuaaguguacccggaaacuaa

SEQ ID NO: 3884 - RNA, 3327 nt, Artificial Sequence
  CCDS32254.1 variant
augggauccaaaggcguauaucaauaccacuggcaaucccacaacguaaaacauaguggggucgacgacaugguacuccucucgaaaaucacagaaaacuccauaguagaaaaucuaaagaaaagauacauggacgauuauaucuucacauacauagguucaguucuaauuucagucaacccauuuaaacaaaugccguauuuuggagaaaaagaaauagaaauguaccaaggagcagcacaauacgaaaacccaccucacauauacgcuuuagcagacaacauguacaggaauaugauaaucgacagagaaaaccaaugcgucauaauauccggugaaucaggagcagguaaaacaguugcagcaaaauauaucaugaguuauaucucacgaguaucaggagggggaacaaaaguacaacacguaaaagauauaauacuacagucaaauccuuuauuagaagccuuugguaaugcaaaaaccgucagaaacaauaauuccucaagguuuggcaaauauuuugaaauucaauucagcccaggcggugaaccagauggcggcaaaauuucuaacuuuuuguuagagaaaagccgaguaguaaugagaaauccaggagaaagaucuuuucacauauuuuaccaauuaaucgaaggagccucagcugaacaaaaacauagccuaggaauaacuagcauggauuauuauuacuauuuaagccuaaguggaaguuauaaaguagaugacaucgaugacagacgagaauuucaagaaacucuucaugcuaugaacguaauuggaauuuuugccgaagaacaaacucuuguauuacaaauaguugcaggaauacuucauuuaggaaacauuagcuuuaaagaaguaggaaauuaugcagcggucgaaagugaagaauuucuagcauuuccagcauaccuauuaggcauaaaccaggauagacucaaagaaaagcucacguccaggcaaauggacuccaaauggggaggaaaaucggaauccauacauguaacacuuaauguugaacaagcaugcuacacaagagacgcuuuagcaaaagcccuacaugcacgaguauucgauuuccuagucgacucaauaaauaaagcaauggaaaaagaucacgaagaauauaacaucgguguauuagacaucuauggauuugaaauauuucagaaaaauggauuugaacaauuuuguauaaauuuuguaaacgaaaagcugcaacaaauauucauagaauuaacacuuaaagccgaacaagaagaauauguacaagaagggauucgauggacacccaucgaauacuuuaauaacaaaauuguuugcgaucuuauagagaacaaaguaaauccacccggaauaaugucaauacuggacgacguaugcgcaacaaugcaugcaguaggagaaggagcagaccaaacuuuacuccaaaaauuacaaaugcaaauaggaucacaugaacauuucaauucauggaaccaaggauucauuauacaccauuaugcaggaaaaguaucauaugacauggacgguuucugugaaagaaaucgcgauguccuguucauggaccuaauagaauuaaugcaaucaucagaacuuccauucauaaaaaguuuguucccugaaaaccuacaagcagacaagaaaggaagaccuacaaccgcaggaagcaaaauaaagaaacaagcgaacgaccuaguauccacucuaaugaaaugcacuccacacuauauccgcuguauaaaaccuaacgaaaccaagaaaccacgagauugggaagagagcagaguuaaacaccaaguagaauaccugggccuaaaagaaaauaucagaguacgacgugcaggauaugcguacaggcgcauauuccaaaaauuucuacaacgauaugcaauucugaccaaggcaacauggcccagcuggcaaggagaagaaaaacaaggaguacuacaucuauuacaaucagucaacauggacagugaucaauuccaacuaggacgcucuaaagucuuuauaaaagcccccgaaucccuguuuuuacuugaagaaaugcgagaaagaaaauacgacgguuaugcaagagucauucagaaaagcuggagaaaauucguagcaagaaagaaauauguacaaaugagagaagaagcaagugauuugcuucuaaauaagaaagagagacgcaggaacucaauaaaccgaaauuucauaggagauuacauagguauggaagaacauccagagcuucaacaauuuguaggaaaaagagagaaaauagauuucgcagauacaguaacuaaauaugauagaagauuuaaaggcguaaaaagagauuuacuccuuaccccaaaaugcuuauaccuaauuggaagagaaaaaguaaaacaagggccugacaaaggccuaguuaaagaaguacucaaacgaaaaaucgaaauagagagaauauuaagcguaucacuuucuacgaugcaagacgauaucuuuauucuacacgaacaggaauaugauagucuuuuggaaaguguauucaaaacagaguuccuaucauuauuagcuaaacgcuaugaagagaaaacgcaaaaacaguuaccauuaaaauucucgaauacacuagaauuaaaacuaaagaaagaaaauuggggaccuuggucagcaggaggcagucgacaaguacaauuucaucaagguuucggagaccuagcaguguuaaaaccaucgaacaaaguauuacaaguaaguauuggaccaggauuaccgaaaaacucacgaccaacaagaaggaauacuacacaaaauacagguuauucaaguggaacccaaaacgcaaacuacccaguuagagcugccccaccaccaccaggauaucaccaaaacggaguaauaagaaaccaauacguaccauauccacaugcccccgggagucaacgaaguaaccagaaaucccuauauaccaguauggcacgaccaccacuaccaagacaacaaucaacaaguagugacagagugucacaaaccccagaauccuuagauuuucucaaagugcccgaucaaggggcagcaggcguacgcaggcagacgacaucaagaccaccaccagccgguggaagaccaaagccacaaccgaaaccaaaaccccaaguaccacaauguaaagcguuauacgcauacgacgcucaagauaccgaugaauuaucuuuuaaugcaaacgauauaauagacauaauaaaagaagacccaucagguugguggaccggaaggcuacgaggcaaacaaggacuuuucccaaacaauuauguuacaaagauauaa

SEQ ID NO: 3885 - RNA, 3297 nt, Artificial Sequence
  AAH28071 variant
augggcagcaaagaaagauuucauuggcaaagccauaauguuaaacaaucagguguugaugauaugguacuacuaccucaaauaacggaagaugcaauugcagccaaccugagaaaacgauuuauggaugauuauauauuuacauauauaggaucaguacuaauuagcguuaacccguucaaacaaaugccuuauuucacagacagagaaauugaucuuuaccaaggagcagcacaauacgaaaauccaccacacaucuacgcguugacagacaacauguauagaaauaugcuuauagacugcgaaaaucaaugcguuauaauuaguggagaaucaggagcagggaaaacgguagcggcaaaguauauaaugggauauauaucaaaaguaaguggaggcggagaaaaaguccaacauguaaaagauauaauauuacaaagcaacccccuccuagaagcauuuggaaaugccaaaacuguaagaaauaauaacucaagcagauucgggaaauacuuugaaauacaauuuagccgaggaggugaaccagauggaggaaaaauuuccaacuuuuuacuagaaaaauccagaguaguaaugcaaaaugaaaaugaaagaaacuuccacaucuacuaccaacuauuagaaggugcaucucaagaacagagacaaaauuuaggcuuaaugacaccagauuacuauuauuauuuaaaucaaucagauaccuaucagguagauggaacugacgacagaucagauuuuggugaaacacuaagugccaugcaaguuauaggaauaccuccuucaauacaacagcuagucuuacaauuaguagcaggcauacuacauuuaggaaacauuucuuuuugcgaagauggcaauuaugcucgaguagaaucaguagaccuacuagcuuuuccggcuuauuuauuaggaaucgacucaggcaggcugcaagaaaaauuaacaaguagaaaaauggauaguagguggggcggucgaagugaaaguauaaauguuacuuuaaacguagaacaagcugcauauacucgagacgcacuagcuaaaggucuauacgcgagguuauucgauuuucuuguagaagcuaucaacagggcuaugcaaaaaccgcaagaagaauacucuauuggggucuuggauauauacggauuugaaauuuuucaaaagaacggauuugaacaguuuuguauaaauuucgugaacgaaaaauuacaacaaauauuuauagaacuuacucuaaaagcagaacaagaggaauauguucaagaaggaauaagauggaccccaauacaauauuucaacaauaaaguggucugugauuuaauagaaaauaaacuaucuccgccaggcauaaugucaguauuagaugacguuugcgcuacaaugcaugcaacagguggaggcgcggaccaaacauuacuacaaaaacuccaagcagcgguaggaacucaugaacauuucaauagcuggucagcagguuuuguaauacaucacuacgcaggaaaaguaucauaugauguaagcggauucugugaacgcaauagagaugucuuauuuucggaccuaauagaauuaaugcaaacaagugaacaagccuuucuacgaauguuauuccccgaaaaauuagauggagauaagaaaggcagaccaucaacagcaggcucaaaaaucaagaaacaagccaaugaucuaguugcaacacugaugagaugcacaccacacuauauuagauguaucaaacccaaugagacaaaacgcccaagagauugggaagaaaacaggguuaaacaucaaguagaauauuugggccucaaagaaaacauaagaguacguagggcaggauuugcuuauagacggcaauuugcaaaauuucuacaaagauacgcaauauuaacaccagaaacuuggccaagauggagaggcgacgaaaggcaagguguccaacaccuauuaagagccguaaauauggaacccgaucaguaccaaaugggaucuacaaaaguguucgucaaaaacccagagagcuuauuucuacuagaagaaguaagagaaagaaaauuugacggauuugcgagaacaauacaaaaggcuuggagaaggcacguagcaguaagaaaauacgaagaaaugagagaagaggcuucaaacauacuccuaaauaaaaaggaacgaaggcgaaacaguauaaauagaaauuuuguaggagauuacuuaggucuggaagaaagaccagaauugcgacaauuuuugggcaaaagagaaaggguagauuucgcagacucaguaacuaaauaugauagaagguuuaaacccauuaaaagagacuuaauacucacaccgaaauguguauauguaauaggaagagaaaaagugaagaaaggacccgaaaaaggacaaguaugcgaaguuuugaaaaagaaaguagauauccaagcacuaagaggaguaucacugaguacaagacaagaugauuucuucauacuacaggaagaugcggcggacagcuuuuuagaaucaguauuuaaaacagaguucguauccuuauuauguaaacgauuugaagaagcaacgaggagaccgcuuccccuaacauucucggauacccuacaauucaggguaaagaaagaagguuggggcggagguggaacuagaagcguaacuuucuccagagguuuuggugacuuagccguacuuaaaguuggaggaagaacguuaacaguaucaguaggugacggacuaccgaaaucaagcaaaccaaccagaaaagguauggcaaaaggaaaaccccgacggagcucucaagcaccuacacgggcggcuccugcgccuccacgaggaauggauagaaacggaguaccuccuuccgcaagaggcgguccauuaccacuggaaauaaugagugguggagguacacauagaccaccgcgaggcccgccaucuacaucgcuaggcgcaucucgaagaccuagagcaagaccaccuagugagcacaauacagaguucuuaaauguacccgaccaaggcauggcagggaugcaaagaaaaagaucaguagggcaaaggccaguaccuggaguaggacgaccuaaaccacaaccgcguacucacggcccgagauguagggcccuauaucaauauguaggucaagauguagacgaauugucauucaauguuaaugaagucaucgaaaucuuaauggaagauccaucaggaugguggaaaggucgacugcacggccaagaaggauuauucccaggcaacuauguggagaaaauuuaa

SEQ ID NO: 3886 - RNA, 3057 nt, Artificial Sequence
  CCDS34629.1 variant
auggaagacgaagaagguccugaauauggaaaacccgauuuuguucucuuagaucaaguaacaauggaagauuuuaugcgaaauuugcaauuaagauuugaaaaaggacgaauauauacauauauuggugaaguucuuguaucagugaacccuuaccaagaauuacccuuauacggaccugaagcaauugcaagauaucaagguagagagcuauacgaaagaccuccacacuuauaugccguugcuaacgcugcauauaaagccaugaaacacagaagcagagauaccugcauaguuauauccggagaaaguggagcagggaaaacagaagcauccaaacauauaaugcaauacaucgcagcaguaacaaacccaagucaacgagcugagguugaaaggguaaaagauguauuauuaaaaucuaccugcguacuagaagcauucggaaacgcuagaacaaacagaaaucauaauucaucaagguuugguaaguacauggauauaaacuuugacuucaaaggagauccaauaggaggacauauucacaguuaccuuuuagagaaaagccggguauuaaaacaacacgucggagaaagaaacuuucaugcauuuuaccaacuauuacgaggcagugaagauaaacaauuacaugaacuacaccuugaaagaaauccagcggucuauaacuuuacucaccaaggagcaggacuaaacaugacaguucacagcgcucucgauucugacgaacaaagccaccaggcagucacagaagcuaugcguguuaucggauuuucaccagaagaaguugaaucaguucacagaauauuagcggcaauacuccaucuuggaaauauagaguucguugaaaccgaagaaggagguuuacaaaaagaaggauuagcuguagcagaagaagcccuaguugaucauguagcagaauugacagcaacacccagagaucuuguacuucguucacuauuagcacgaacaguagcaucuggagguagagaacuuauagaaaaaggacauacugcagcagaagcaagcuaugcgcgugaugcaugcgcaaaggcuguauaucaacgucuauucgaauggguuguaaauagaauaaauucaguuauggaaccaagagggagagauccccguagagauggaaaagauacaguaauugggguuuuagauaucuacgguuucgaaguauuuccuguaaauucauuugaacaauuuugcauuaauuauuguaacgaaaaacuacaacaacuauucauccaacuaauauugaaacaagaacaagaagaauacgaacgagaaggcauaacuuggcaaucaguagaauacuuuaauaaugcaacgauuguagaccuaguagaaagaccacacagggggauucuagccguacuugaugaagcgugcuccuccgcaggcaccaucacagacagaauauuuuugcaaacauuagauaugcaucaucgacaccacuugcauuacacaagucggcaacuuuguccuacugauaaaacaauggaguucggacgugauuuucgaauaaaacacuacgcaggggacguaacauacagcguagaaggcuuuauagauaaaaacagagauuuucucuuucaagauuuuaaaagacuacuauauaauucaacagaucccacucuaagggcaauguggccagauggacaacaagauauaaccgaagugaccaaaagaccauuaaccgcagggacacuguucaaaaacagcaugguagcacugguagaaaauuuagcauccaaagaaccauucuauguaagauguauuaaaccgaacgaagauaaaguugcaggcaaauuagaugaaaaucauuguagacaucaaguagcauaccuaggacuacuagaaaacguaagaguuagacgagcaggauucgcauccagacaaccauacagcagauuucugcugagauacaaaaugacgugugaauacacauggccaaaucaccucuuagggucugacaaagcagcagucucagcccuccuagagcaacauggauugcaaggugauguagcuuuuggucauagcaaauuauuuauuagaagcccaagaacucuagucacacuagaacaaucaagagcgagacuaauacccauaauuguauuacugcugcaaaaagcauggagaggaacuuuagcuagguggagguguagaaggcuacgagccauauauacuauaaugagaugguuucgacgacauaaaguucgagcucacuuagccgaguuacaacgacgguuucaagccgcacgccaaccuccacucuauggccgagauuuggucuggccucuaccaccagccguucugcaaccuuuucaagauaccugucacgcccuauucugcagauggcgagcuagacagcuagucaaaaauauaccaccaucugauaugccacaaauaaaagcuaaaguggcugcaaugggcgcacuacaaggauuaagacaagauuggggaugucgucgagcuugggcucgggauuauuuaagcagugcaacagauaaucccacugcuucaucacuuuuugcacaacgucuaaagacuuuacaagauaaagaugguuuuggagcaguccuauuuucaagucauguuagaaaaguaaauagauuucacaaaauacgaaaucgagcgcuacugcucacagaucaacaccuauauaaacuagacccagauagacaauacagaguuaugagagcaguaccacuagaagcugucaccggacucucaguaacaagugguggagaucaacuuguaguacuucaugcaagaggucaagaugaccucgugguuuguuuacauagaucgcgaccuccauuagauaacagaguaggagaacuugugggaguccuagccgcacacugucaaggugaagggagaacauuagaaguaagaguaagcgacugcauaccacuaagccaccgggguguaagaagacuaauaucaguugaaccaagaccagaacaaccagaaccugacuuuagaugcgcacgcggaucuuucacauuacuauggccuucuagauaa

SEQ ID NO: 3887 - RNA, 3069 nt, Artificial Sequence
  CCDS53826.1 variant
auggaaggagcacuaacagcacgagauaaaguagguguucaagauuuuguacuauuagaugccuauacgagcgaaagugcauuuguugacaaucuaagaaaaagauuuucugaaaacuuaaucuacaccuacauaggaacacuccucguaucuguuaaucccuaucaagaacugggcauauacacaguuucacaaauggaacucuaucaaggaguuaacuucuucgaauugccaccgcauguuuacgcuauagcagauaaugcauacaggaugaugugugcagaacugaauaaucauuucauucucaucaguggggaaucuggagcaggcaaaacugaggcuaguaagaaaauacuugaauauuucgccguaacuugcccaaugacacaaucccuccaaauagcucgggaccgucuacucuucucaaacccaguguuagaagcauuuggaaaugcaagaaccuuaagaaacgauaauagcucaagauucgguaaauauauggauauacaauuugauuuucaagguauuccaguaggaggacacaucauaucuuacuuaauagaaaaaucucgaguaguauaccagaacgaaggagaacguaacuuucacaucuuuuaccaacuacuagcaggaggagaagaagaacgacuaaguuacuuaggguuagaaagagauccccaauuauacaaauaccuaagucagggacacugugcaaaagagucuaguauaagcgauaaaaacgacuggaaaacaguaucaaacgcguuuucaguaauagauuuuacugaggcggaucucgaaaaccucuucgguaucauagcauccguguuacacuuagguaauauaggauucgaagaagaugaucagggcugcgcaacaauaccagacacacacgaaauaaaauggauagcaaaauuauuaggaguacauccgagcguacuacuagaagcccuaacacacagaaaaaucgaagcuaaaacagaagaaguaauauguccgcuaaccuuagaacucaguguauaugcgagagacgcuauggcaaaagcaguauauggacggacauuuacauggcuuguaaacaagauaaacuccucauuagucaacaaggacuucacucguaaaacuguuauuggauuacuagauauauacggauucgagguauuugacaaaaacggauucgaacaauuuuguauaaauuauuguaacgaaaaacuacagcaacuauuaauagagagaaccuuaaaagcagaacaagcagaauaugaaauggaggguauagaaugggaaccaaucaaauauuucaacaacaaaauaauaugugaucuaguugaagaaagacacaaaggaauaauaucaauuuuagaugaagaauguauaagaccaggaccagcaacagacuuaucauuccuugaaaaauuggaagaaaaaguaggaaaacaugcgcauuuugaaacgcgaaaacuagcgggaccaaaaggaagaaaaagaauaggcuggauggaauuuagacuccugcacuaugcuggugaaguaacauauugcacuaaaggauuucuggagaaaaauaaugaccuacuauauagacauuuaaaagaaguacuaugcaaaaguaaaaauauaauacuaagagaauguuuucuucuagcagaacuagaaaauagaagacgaccuccgacaguaggaacucaguucaaaaauagccuuaguagccugcuagaaaccuugauaucaaaagaaccgucauacauuagaugcauaaagccuaacgauagaaaagaaccaucaaaauuugacgauuuccuaauacgacaccaaauuaaauacuuaggauuaauggaacaccuacgaguaagacgagcuggauucgcauauagaagaaaguaugaacauuuucuacaaagauacaaaucguugugccccgacacguggccucauuggcauggaccaccagcagagggaguagaacggcugauuaaauacauuggcuauaaaccagaagaauauaaauugggaaaaacaaaaauuuuuauccgauucccgagaacuuuauucgcuacugaggacgcauuugaauuuucaaaacaccaauuaguagcaaggauucaagcaacauauaaaagaugucuaggucgaagagaauacgugaagaaacgucaagcagcgaucaaauuagaggcacauuggaggggagcuuuagcaaggaaagcuauucaaagaagaaaaugggcgguaagaauaaucagaaaauucauaaaaggauucauaaguaggaacaagccacuaugcccugauaacgaggaauuuauaguguuuguacggaaaaauuauauacuuaauuugagauaucauuuacccaagacaguauuagacaaaucaugguuaagaccaccaggaauacuagaaaaugcgucagacuuauuaagaaaaaugugcguaagaaauuuaguacaaaaauauuguagaggaauaacagcagaacgcaaagcuaugaugcagcaaaaaguaguaacaucagaaauuuucagaggccguaaagaugguuacacugaaucucuaaaucaaccguuuguuaacagucgaauagaugaaggggauauaaaccccaaaguacuacaauuaauaagucacgagaaaauacaauauggaguaccggugaucaaauaugauagaaaaggguuuaaagcaagacaaagacaacuaauacuaacacaaaaagcagccuauguaguagaacuagccaaaauaaaacagaaaauugaauacagugcuuuaaaaggagucucaacaucaaaucucucagaugguauauuagugauacacguaucaccagaagauaguaaacaaaaaggugaugcagucuuacaauguggacacguauucgaagcaguaacaaaauugguaaugcuggucaagaaagaaaacauaguaaaugugguacaaggcagcuugcaauucuuuauaucaccagguaaagaagggacaauugucuuugacacaggacuagaagaacaagucuacaaaaauaaaaauggucaauuaacaguaguuucaguuagaagaaaaagcuga

SEQ ID NO: 3888 - RNA, 2379 nt, Artificial Sequence
  BAC84969 variant
augauaacagugaauccagaugggaaaauaaugguuaggcgaugucuagucacauuaagaccauuucgccuuuuuguucucgggauuggauucuuuacauuaugcuuuuuaaugacaucucuagguggacaauuuuccgcaagaagauuaggagauuccccauucacaauccgaacagaaguaaugggaggacccgaaucucgaggaguauuaagaaaaaugucugaccuuuuagaacuuaugguaaaaagaauggaugcacuagcuagacuggaaaacucaucagaacuacaucgugcaggaggggaccuacauuucccagcagauaggaugccacccggagcugguuuaauggaaagaauacaagcaauugcccagaacgucuccgauauagccguaaaaguagaucagauacuaagacacucauuauuguuacacucuaaaguaagugaaggacgacgugaucaaugugaagcaccaucugauccuaaauuuccugauuguucuggcaaaguagaauggaugcgggcuagauggacaucggauccauguuaugcauuuuucggcguagauggaacagaaugcuccuuucuaaucuauuuaucagaaguugagugguucuguccaccacuaccuuggagaaaucaaacggcugcucagagagcacccaaaccccuaccaaaaguacaagcaguauuucggucuaacuuaucacacuuauuagacuuaaugggcucagguaaagagagcuuaauauuuaugaagaaaagaacaaaaagacucacagcacaaugggcauuagccgcacaaagacuagcacaaaaauuaggagccacacaaagagaucaaaaacaaauacucguucacauagguuuucuuacagaagaaucaggagauguauuuucaccucgcguauuaaaaggaggcccccuuggagaaauggugcaaugggcagacauacuaacagccuuauauguucuaggucacggucuacgcguaacaguuucacuuaaagaauuacaauccaaccuaggaguaccaccuggcagaggaucauguccucuaacaaugccccuaccauuugaccuuauauacacagauuaucacggacuacagcaaaugaaaagacacauggguuuaucauuuaagaaauauagauguagaauaaggguuauagauacauucggaacagaaccagcauacaaccaugaagaauacgcaacuuuacauggauaucgaacaaauuggggauauuggaacuuaaauccaaaacaauucaugacaauguuuccacauacacccgauaauucauuuaugggauuuguaucagaagaacuaaaugaaaccgagaaaaggcuuauaaaaggagguaaagcaucaaauauggccguuguauaugguaaagaagcaucaaucuggaaauuacaaggaaaagaaaaauucuuaggcauacucaacaaauauauggaaauacauggaacgguuuacuacgaaucucaacgaccaccagaaguccccgcuuucguuaaaaaucauggauuguuaccccaaccagaguuccaacaauuauuacgaaaagcuaaauuauucauaggcuuuggcuuuccauaugaaggacccgcuccacuagaagcaauugcuaaugguuguauauuucuccaaagccgcuuuucaccaccacacucaucuuuaaaucaugaauuuuuccgaggaaaaccaacaaguagggaaguauuuucacaacaucccuacgcugaaaacuuuaucggaaaaccucauguauggacaguagacuauaacaacucagaagaauuugaagccgccaucaaagcuauaaugagaacacaaguagauccauaccuaccauaugaauauacaugugaagguaugcuagaaagaauacaugcauauauucaacaccaagacuuuuguagagccccagacccugcuuuaccugaagcacaugcaccccaaagucccuuuguacuagcaccaaaugccacacauuuagaaugggcaagaaauacaucauuagcaccaggagcuuggccaccagcacaugcacuaagagccugguuagcuguaccaggacgcgcguguacagacacauguuuagaccacggucucauuugugaaccaucauucuuuccuuuucuuaacucccaagacgcauuuuuaaaacuacaaguuccaugugauagcaccgaaagugaaaugaaucauuuauauccggcauuugcacagccaggacaggaauguuauuuacaaaaagaaccacuauuauuuucuugcgcuggaagcaacacuaaauacaggagauuaugucccugccgcgauuuuagaaaaggacaaguagcauuaugccaaggaugucuauaa

SEQ ID NO: 3889 - RNA, 36 nt, Artificial Sequence
  AF164963.1 variant
augacacaaggccaacacuuccuccaaaaaguauaa

SEQ ID NO: 3890 - RNA, 2211 nt, Artificial Sequence
  AAI11702 variant
augaaagaaauguccgcuaacacugugcuagauucacaaagacaacaaaaacauuacggaauaacaaguccaauaucacuagccucaccaaaagaaaucgaccauaucuacacccaaaaauuaaucgaugccaugaaaccauuugguguuuuugaagaugaagaagaacucaaucacagacugguaguacuuggcaaauuaaacaacuuaguaaaagaauggauaucagauguauccgaaucaaaaaacuugccaccuucaguagucgccacaguugguggaaaaauauucacauuuggcucauauagacucggaguacacacaaaaggagcagauauagacgcauuauguguagcaccucgacacguagaaagaagugacuuuuuucaaaguuuuuuugaaaaacuaaaacaccaagacggaauacgcaacuuaagagcaguugaagacgcauuuguacccguaauaaaauuugaauuugaugguauagaaauagacuuagucuucgcacgacuagcaauacaaaccaucucugacaaccuugacuuaagagaugauucaagacuaagaagucuagauauacggugcaucagaucacuaaauggcugcagagucacagaugaaauauuacacuuaguaccaaacaaagaaacuuucagacuaacacuaagagcuguaaaauuaugggcaaaaagaagaggaauauacucgaacaugcuaggcuuuuuaggcggaguaucuugggcaauguuagucgcaagaacaugccaauuauauccuaacgcagcagcuuccacauuagugcauaaauuuuucuuagucuuuucaaaaugggaauggccaaauccuguauuacuaaaacaaccagaagaauccaaccuaaaccuacccguuugggacccacguguaaauccaucagauagauaccauuuaaugcccauaauaacaccagcauacccacagcaaaauucaacauacaacguauccaccucaacuagaacugucaugguugaagaauucaaacaaggacuggccguaacagaugaaauccuucaaggaaaguccgauuggucaaaauuauuagagccaccuaacuucuuccaaaaauauagacacuacauaguucuaacagccuccgccucgacagaagaaaaccauuuagaauggguaggcuuagucgaaucuaaaauuagaguacuagucgguaaccuggaaagaaacgaauuuauaacacucgcacacguaaauccacaaucauucccaggaaacaaagaacaccacaaagacaauaauuauguuucaaugugguuucuaggaauaauauuccgacgaguagaaaacgcagaaucaguaaauauugauuuaacauacgacauacaaucauuuaccgauaccguauacagacaagcgaacaauauaaauaugcuaaaagaaggcaugaaaauagaagcaacacauguaaaaaaaaaacaacuacaccacuaccuaccugcagaaauauuacaaaaaaaaaaaaaacaaucauuaucagaugucaaucgauccagcggugguuuacaaucaaaaagacucaguuuagacuccuccugccuagacucaagucgagacacagacaacggaacaccuuucaauucuccugcaucaaaaagcgacucaccaagcgucggagaaacugaaagaaacagcgcagaaccagccgcagucauuguagaaaaaccgcuuucuguaccaccagcucaaggacuaucgaucccaguaauaggagcaaaaguagacuccaccguuaaaacagucagcccaccaacagucugcacuaucccuaccgucguaggucguaacgucauuccucguauuacaacuccacauaauccagcacaaggucaaccacaccucaacggaaugucaaauauaacaaaaacaguaacgccaaaacgaucacacucccccaguauagacggaacaccaaaacgauuaaaagacguagaaaaauucaucagauuggaaucaacguuuaaagauccaagaacugccgaagaaagaaaacgcaaaucaguagacgcaauaggaggagaaucaaugccaauaccaacaauagacaccagucgcaaaaaaagacuuccaucuaaagaauuaccagauucaucuuccccagugccagcaaauaauauaagaguuauaaagaauaguauaagacuaacauuaaacagauaa

SEQ ID NO: 3891 - RNA, 1377 nt, Artificial Sequence
  AAG28389 variant
augucaacagaaggaggauuuggaggaacaucaucaagcgacgcacaacaaucucuacaaucauucuggccacgaguaauggaagaaaucagaaacuuaacaguaaaagauuucagaguacaagaauuacccuuagccagaauaaaaaaaauaaugaaacuagacgaagacgucaaaaugauaucagccgaagcuccaguauuauucgcuaaagcagcacaaauauuuauaacagaauuaacacuacgugcauggauacacaccgaagacaacaaaagaagaacacuccaacgcaaugacaucgcuauggcaauaacaaaauucgaccaauucgacuuccuuauugauauagucccacgugacgaauuaaaaccacccaaaagacaagaagaaguacgacaaucaguaacaccagccgaaccaguucaauacuacuucacucuugcucaacaacccacagcaguacaaguucaaggacaacaacaaggacaacaaacaacauccucaacaaccacaauucaaccaggacaaauaauaauagcacaaccucaacaaggacaaaccacaccaguaacaaugcaaguaggagaaggacaacaaguacaaauaguccaagcacaaccucaaggucaagcacaacaagcccaaucaggaacaggacaaacaaugcaaguaaugcaacaaauaauuacaaacacuggagaaauacaacaaauaccaguacaauuaaacgccggccaauuacaauacauaagacuagcccaaccugucuccggcacacaagucguacaaggacaaauacaaacauuagcaacaaaugcacaacaaggacaaaggaaugcaucucaaggaaaaccaagacguugccuaaaagaaacacuacaaauaacucaaacagaaguacaacaaggccaacaacaauuuucccaauucacagauggacaacgaaacucaguacaacaagcaagaguaucagaacuaacaggagaagcugaaccacgagaaguaaaagcaaccggaaacagcacaccuuguaccaguucccuuccaaccacacaccccccaucacacagagcaggagcaagcuguguaugcuguucacaaccacaacaauccucaacaucaccucccccaucagacgcacuacaguggguaguaguagaaguaucaggaacuccaaaucaacucgaaacccacagagaacuacaugcaccccuaccaggaaugacaucacuaagcccacuacauccaucccaacaauuauaccaaauucaacaaguaacaaugccugcaggacaagaucuagcccaaccaauguucauacaaucagccaaccaacccucagacggccaagcaccacaaguaacaggagacuaa

SEQ ID NO: 3892 - RNA, 2802 nt, Artificial Sequence
  CCDS33423.1 variant
augagaauggccgcaacagcaugggcuggacuacaaggaccuccauuaccaacacuauguccagcaguuagaacaggacuuuauuguagagaucaagcacacgcagagagaugggcaaugacgagugaaacauccagcgguucacauugugcacgcaguagaaugcuaagacguagagcacaagaagaagauucuaccguauuaauagaugucucaccuccagaagccgagaaaagaggaagcuauggcucaacugcccaugcaagugaaccaggcggacaacaagcagcugcuuguagagccgguaguccagcaaaacccagaaucgcagauuuuguauuaguuugggaagaagacuuaaaacuugauaggcaacaagauucagcugcaagagauagaacagauaugcaccgaacguggagagaaacauucuuagauaauuuaagagccgcaggucuauguguagaucaacaggauguacaagauggaaauacaacaguacacuaugccuuacuaucugcaucuugggcaguacucugcuauuacgcugaggaucuaagauuaaaacuaccauuacaagaacuuccaaaucaagcuagcaacuggucagcuggauuauuagcauggcuugggauucccaauguccuguuagaaguaguuccugacguaccacccgaauauuauuccuguagguuccguguaaauaaauuaccaagauuucuuggaucagauaaucaagauacauucuuuacaagcacaaaacgacaccaaauccuauucgagauuuuagccaaaacaccauacggacaugaaaagaaaaauuuacuaggaauacaucaauuauuagcugaagguguucucuccgcugccuuuccacuacaugauggaccuuuuaaaacacccccagaaggaccccaggcaccacgauuaaaucaacgccaagucuuauuucaacacugggcacgauggggaaaauggaauaaauaucaaccacuagaucacgucagacgauacuucggagaaaagguugcacuauacuuugcauggcuuggcuuuuacacagguugguuacuaccugcagcaguaguagguaccuuaguuuuucucguaggcugcuuuuuaguuuucuccgacauuccaacacaagaauuauguggaucgaaagauuccuuugaaauguguccccuuugccuagauuguccauuuuggcucuuaucaucagcaugcgcuuuagcucaagcagguagauuauuugaucauggcggcacaguauuuuucucacuuuuuauggcauuaugggcaguucuauuacucgaauauuggaaacgaaaaagcgcuacguuggcauacagaugggacuguagcgauuacgaagauacagaagaaagaccacgaccucaauuugcagcaagugcuccaaugacagccccaaauccaauaacaggagaagaugaaccauacuuccccgaaagaucucgagcaagaagaauguuagcaggaucuguaguaauaguaguuaugguagcgguaguaguaaugugccuaguuucuauaauauuauauagggccauuauggcaauuguuguuaguagaucuggaaacacuuuacuagcagccugggccagcagaauugcaucacuaacaggaucaguaguaaauuuaguuuucauauuaauacuaucuaaaauauauguaucccuagcacauguccuaacaagaugggaaaugcaccgaacccaaacaaaauuugaagaugcguucacauuaaaaguuuucauauuucaauucgugaauuuuuacagcagucccguauacauagcuuucuuuaaaggacgauuuguagguuacccggguaacuaccacaccuuauucgguguuagaaaugaagaaugugcugcuggaggaugucuaauagaacuagcccaggaauuauuaguuauuaugguaggaaaacaaguuaucaauaauaugcaagaaguacugauaccaaaauuaaaagguugguggcagaaauucagacuacgaucaaagaaaagaaaagcaggagcuucugcaggggcaucacagggaccuugggaagacgauuaugagcuaguaccuugcgaaggacuauucgaugaauacuuagaaaugguacuucaauuuggauuuguaacaaucuuuguagcugcuugcccauuagcaccauuauucgccuugcuaaauaauuggguagaaauaagauuagacgcccgcaaauuuguaugugaauauagacgaccagucgccgagagagcccaagauauaggcauuugguuccauauauuagcaggucucacucauuuagcaguaauuucuaacgccuuccuacuagccuuuucuagugauuuucuaccucgagcguacuauagauggacaagagcccaugacuuaagagguuuccuaaauuuuacccuagcucgagcaccuuccucuuuugccgcagcucauaacagaaccuguagauaccgugcguucagagacgaugauggacauuauucucaaacuuacuggaauuuauuagcuauaagauuagcauucguaauaguauuugaacacguggucuuuagcguuggucgacuucuagaucuauuaguaccugauauuccagaaaguguagaaauaaaaguaaaaagagaauauuauuuggcaaaacaagcauuagcugaaaaugaagugcuauuuggcacaaauggaacaaaagaugagcagccagaaggaucugaauuaucaucccauuggacacccuuuacaguaccuaaagcaucacaacuccaacaauaa

SEQ ID NO: 3893 - RNA, 885 nt, Artificial Sequence
  AAA36380 variant
auggaagacucaauggauauggauaugucaccauuaagaccacaaaauuacuuauuuggaugcgaacuaaaagcagauaaagauuaucauuucaaaguagauaacgaugaaaaugaacaucaauuaaguuuaagaacuguaucacuaggagcaggggcaaaagacgaacuacauauaguagaagcagaagcaaugaauuacgaaggaucaccaauaaaaguaacauuagcaacacuaaaaaugaguguacaaccaacaguuucacuagggggauuugaaauaacaccacccguaguccuaagacuaaaauguggaucaggaccaguacauauaucaggacaacacuuaguagcaguagaagaagaugcagaaagcgaagacgaagaagaagaagacguuaaacuauuaagcauaagcggaaaaagaagcgcaccaggaggaggaaguaaaguaccacaaaaaaaaguaaaauuagcagcagacgaagacgaugacgaugacgaugaagaagacgaugacgaagacgaugacgaugacgauuucgaugacgaagaagcagaagaaaaagcaccaguaaaaaaaagcauuagagauacaccagcaaaaaaugcacaaaaaagcaaucaaaacggaaaagacaguaaaccaagcucaacaccaagaucaaaagggcaagaaagcuucaaaaaacaagaaaaaacaccaaaaacaccaaaaggaccaagcagcguagaagacauaaaagcaaaaaugcaagcaaguauagagaaaggaggaagucuaccaaaaguagaagcaaaauuuauaaauuacguuaaaaacuguuucagaaugacagaucaagaagcaauacaagaucuauggcaauggcgaaaaagucuauaa

SEQ ID NO: 3894 - RNA, 3915 nt, Artificial Sequence
  CCDS47686.1 variant
augcaauuaaaaauuaugccaaaaaaaaaacggcucuccgcaggaagaguuccgcuuaucuuauuuuuaugucaaaugauaagugcauuagaaguuccauuagacccuaaguuauuagaggaucuaguacaaccccccaccauaacucaacaaucaccaaaagacuauauaauagacccaagagaaaauauaguaauacaaugcgaagccaaagguaaaccaccaccaaguuuuucauggacacgaaacgguacacauuucgacaucgacaaagauccuuuaguaacaaugaaaccuggaacgggcacauuaauaauaaauaucaugucugagggaaaagccgaaacauaugaagguguuuaucagugcaccgcucggaacgaaagaggugcugcaguauccaauaacauaguaguaagacccagccgcucaccccuuuggaccaaagaaaaacucgaaccuaucacacuucaaucuggacaaucauuaguucuuccuuguagaccaccaauuggacuuccaccaccaauaauauucuggauggacaacagcuuccaacgauuaccucaaucagaaagaguuagccaaggacuaaauggagacuuauacuuuuccaacguacugcccgaagauacgagagaagacuacauuuguuaugcucguuucaaucauacgcaaacgauucaacaaaaacaaccuauuuccgucaaaguaauaaguguggaugagcuaaacgauacaaucgcugcaaacuuaagugacacagaauucuacggugccaaaucauccagagaacgcccaccaaccuuucuuacgccagaaggaaaugcuaguaauaaagaagaacuccgaggaaacguacuaucucuagaguguauagccgaaggauuaccaacaccuauaauauacugggccaaagaagacggaauguuaccaaaaaauagaacaguauacaaaaacuuugaaaaaacuuuacaaauuauucauguauccgaagcagacagcgguaacuaccaaugcaucgcaaaaaaugccuugggugccauccaccauacuauuagcguaagagucaaagcagcuccauauuggaucacugcuccacaaaaucuuguauuaaguccuggagaagaugggacccuaauaugccgugcaaaugguaauccuaaaccaagaaucucuugguuaaccaauggaguaccgauugaaauagcaccagacgauccuaguagaaagaucgauggagauacaauaaucuucucuaauguacaagaaagaagcucagcaguguaucaauguaacgcaagcaaugaauacggguauuuauuagccaacgccuuugucaauguuuuagcugaaccaccgaggaucuuaacaccggcaaauacauuguaccaaguaauugcaaauagaccugcgcuucuagauugcgcauuuuuugguaguccauuaccuaccauugaaugguucaaaggagcaaaagguucagcccuacaugaagauauuuacguacuccaugagaauggcacccucgaaauaccuguggcccaaaaagacaguacaggaacauauaccuguguugcuagaaacaaauuagguauggcaaaaaaugaaguacaucucgagauaaaagauccuacuuggauaguuaaacaaccagaauaugcuguuguucaacguggaucaaugguaucauuugaaugcaaaguuaaacacgaucauacucuuagccuuacaguacuaugguuaaaagacaacagagaacuuccuucugacgaaagguuuacaguagauaaagaucauuuaguaguugccgacguaucagaugaugauucugguacauauacaugcgucgcaaacacaacacuagauaguguaucagcaagugcuguucuuucagucgucgcuccuacccccacaccggcaccuguuuaugauguucccaacccaccauuugaucuggaauuaacagaccaauuggacaaaagcguucaauuaagcuggacgccaggugaugauaacaacagcccgaucacuaaauuuauaaucgaauacgaagaugccaugcacaaaccaggccuauggcaccaucagacagaagugucagggacacaaacgacagcacaacuaaaacuaagcccauauguaaauuauucauuucgcgucauggcuguaaauucaauagguaaaagcuuaccauccgaagcaucagaacaauacuuaacuaaagcaucagaaccagauaaaaacccaacagcuguagaagguuuagguagcgaacccgacaaucuuguaauaacauggaaaccacuaaauggcuucgaaaguaauggaccaggacuacaauacaaagugaguuggagacaaaaagacggagacgacgaauggaccaguguaguuguagccaaugucagcaaauauauagugucggguacuccaacauuuguaccuuaucucauuaaaguacaggcacuuaacgacaugggcuucgccccagaaccugcagucguaaugggucauucaggcgaagaccuaccaaugguagcaccugguaacguacgaguaaacguaguaaauuccacccucgcugaaguccacugggauccaguaccauuaaaaucaauacgaggccauuuacaagguuauagaauuuacuacuggaaaacccaaaguagcucuaaacgaaaucgucgccauauagagaaaaaaauucugaccuuccaaggcaguaaaacucauggcaugcuacccggccuggaaccauuuucacauuauacucuaaacguaaggguuguaaacggcaaaggugagggaccagcaucuccagauaggguauucaauacacccgaagguguacccucagcgccaaguucgcuaaaaauaguuaaucccacacucgauucucuaacacuagaaugggauccucccucacacccaaacggcauauuaacugaauacacacuaaaauaccaaccaauuaauucaacacaugaacuuggaccccuuguugaucuaaaaaucccugcuaacaaaacaagauggacacuaaaaaacuuaaauuuuucaacacgauauaaauucuauuucuacgcacaaacaucagccggcucaggcucacagauuacagaagaggcagucacaacaguagaugaagcagguauauuaccuccagacguaggagcgggaaaagugcaagccguaaauccaagaauaucgaaucuuacagcagcugcagcugaaacauaugccaauauaagcugggaauaugaaggacccgaacacguaaacuucuacguagaauacggaguagcggguucuaaggaggaauggcguaaagaaaucguaaaugguucaagaagcuuuuucggacuaaaaggucuaaugccaggcacugccuauaaaguuagaguuggcgcaguaggagauagcggauucguaagcucugaagauguauucgaaacuggacccgcaauggcuucaagacaaguagauauagcaacccaaggaugguuuauaggcuuaaugugugcugucgcuuuacuaauauuaauucuacuuauaguauguuuuauaagaagaaacaaaggcggcaaauacccaguaaaagagaaagaggaugcacaugcagaccccgaaauccaaccuaugaaagaagaugauggaaccuuuggagaguacagcgaugcugaagaucacaagccucuaaaaaaaggcucuagaaccccaucagauagaacaguaaaaaaggaagauucagacgauucguuaguagauuacggugagggcguuaacgggcaauuuaacgaagauggcucauuuauaggacaauacaguggaaagaaggaaaaagaaccugcagaaggaaaugaaaguucagaagcuccaucuccuguaaaugcaaugaauagcuuuguauaa

SEQ ID NO: 3895 - RNA, 1305 nt, Artificial Sequence
  AAB51320 variant
augucaauagagaaaauaugggcgagagaaauacuagacucaagaggaaaccccacaguagaaguagacuuauacacagcaaaaggauuauucagagcagcaguaccaagcggagcaaguacaggaauauaugaagcauuagaauuaagagacggagauaaacaaagauaccugggcaaaggaguacuaaaagcaguugaccauauaaauucaacgauagcaccagcauugauaucaucaggauuaucaguaguagaacaagaaaaacuagacaauuuaaugcuagaauuagacggaacugaaaacaaaaguaaauuuggagcaaaugcaauuuuaggaguaucauuagcaguauguaaagcaggagcagcagaacgagaacuaccacuauauagacauauagcacaauuagcaggaaauucagaccuaauauuaccaguaccagcuuuuaacguaauaaacggaggaagucaugcaggaaauaaacuagcaaugcaagaauuuaugauccuaccgguaggagcagaaaguuucagagaugcaaugagauuaggagcagaaguauaccauacauugaaaggagucauaaaagauaaauauggaaaagacgcaaccaauguuggagacgaaggcgguuuugcaccaaauauacuagaaaauagcgaagcguuagaauuaguaaaagaagcaauagauaaagcaggauacacagagaaaauaguaauaggaauggacgucgcagcaagugaauuuuaccgagacggaaaauaugaccuagauuuuaaaagcccuacagacccaucacgauacauaacgggagaucaauuaggcgcucuauaucaagauuucguacgagauuauccaguaguaagcauugaggauccauucgaccaagacgauugggcagcauggucaaaauucacagcaaaugucggaauacaaauaguaggagaugacuuaacaguaacaaauccaaaaagaauagaaagagcaguagaagaaaaagcaugcaauugcuuguuauuaaaaguuaaccaaauaggaagcguaaccgaagcuauacaagcauguaaauuagcacaagaaaacggauggggagucaugguuagucacagaagcggcgaaacagaagauacauuuauagcagacuuagucguaggauuaugcacaggacaaauaaagaccggagccccaugcagaagugaaagacuagcaaaauauaaucaauuaaugagaauagaggaagaacucggagacgaagcacgauucgcaggacauaacuuuagaaauccaaguguacuguaa

SEQ ID NO: 3896 - RNA, 1395 nt, Artificial Sequence
  AAH08489 variant
auggaaacccuaagcuuccccagauacaacgucgcagaaauaguaauacauauaagaaacaaaauacuaacaggcgcagacgguaaaaaccucaccaaaaaugaccuauacccaaauccaaaaccagaaguauuacacaugauauacaugcgagcacuccaaauaguauacggcauacgauuagaacacuuuuacaugaugccagucaacucagaaguaauguacccacaccuaauggaagguuuccuccccuucaguaaccucguaacgcaccuagauagcuuucuaccaauauguagaguaaacgacuucgaaacagcagacauccuaugcccuaaagcaaaaagaacuuccagauuccuuucaggaauaaucaacuucauacacuuccgagaagcaugcagagaaacauacauggaauuccuauggcaauacaaaucaucagcagacaaaaugcaacaacuaaacgcagcacaccaagaagcacuuaugaaauuagaaagacuagacagugucccagucgaagaacaagaagaauucaaacagcuaucagacgguauacaagaauuacaacaaucacuaaaccaagacuuccaccaaaaaaccauaguacuacaagaaggaaacucacaaaaaaaaagcaauauauccgaaaaaacaaaacgacuaaacgaauuaaaacuaaguguaguaucacuaaaagaaauacaagaauccuuaaaaacaaaaauaguagacucaccagaaaaacuaaaaaacuacaaagaaaagaugaaagauacaguccaaaaacuaaaaaacgcccgacaagaaguagucgaaaaauacgaaauuuacggagauuccguagacugucuaccaagcugccaacuagaaguacaauuauaccaaaaaaaaauacaagaccuaucagauaaccgagaaaaacuagcaucaauacuaaaagaaucacuaaaccucgaagaucaaauagaaucagacgaaagcgaacuaaaaaaacuuaaaacagaagaaaauagcuucaaaagacuaaugauaguaaaaaaagaaaaacuagcuacagcacaauucaaaauaaacaaaaaacaugaagacguaaaacaauacaaacgaaccgucauagaagauuguaacaaaguacaagaaaaaagaggcgcaguuuacgaacgaguaacgaccaucaaucaagaaauacaaaaaauaaaacucggcauacaacaacuuaaagacgccgcagaaagagaaaaacuaaaaagccaagaaauauuccuaaaucuaaaaacagcacuagaaaaguaccacgauggaaucgaaaaagcagcagaagacagcuacgcaaaaauagaugaaaaaacagccgaacuuaaaagaaaaauguucaaaaugucaacauaa

SEQ ID NO: 3897 - RNA, 543 nt, Artificial Sequence
  AAB49693 variant
augcaagcagaaggacgaggaacaggaggaaguacaggagaugcagauggaccaggaggaccaggaauaccagauggaccaggaggaaaugcaggaggaccaggagaagcuggagcaacaggaggaagaggaccaaggggagcaggagcagcaagagcaagcggaccaggagguggagcaccaagaggaccacauggaggagcagcaaguggauuaaauggauguuguagauguggagcaagaggaccagaaaguagauuauuagaauuuuauuuagcaaugccauuugcaacaccaauggaagcagaauuagcaagaagaaguuuagcacaagaugcgccaccauuaccaguaccaggaguauuauuaaaagaauuuacaguuaguggaaacauauuaacaauaagacuaacagcagcagaucauagacaauuacaauuaaguauaaguaguuguuuacaacaauuaagucuauuaauguggauaacacaauguuuucuaccaguauuuuuagcacaaccaccaagcggacaaagaagauaa

SEQ ID NO: 3898 - RNA, 1215 nt, Artificial Sequence
  CCDS14134.2 variant
auggcaucuccaagacuaggaacauucugcuguccaacacgagaugcagcaacucaacuaguauuaucauuucaaccaagagccuuucacgcacuuugucuaggauccggaggauuacgacuagcacuaggauuacuacaacuauuaccaggacgaagaccagcaggaccaggcagcccagcaacuucucccccagcaucaguacgaauauuacgagcagcagcugcaugugacuuacuaggauguuuagguauggucauaagaucaacaguaugguuaggauuuccaaauuucguagacucaguaucugauaugaaucacacagaaauuuggccugcagcauuuuguguaggcucagccauguggauacaauuauuauauagcgcauguuuuuggugguuauuuugcuaugccguagacgcauaucuaguaauaagaagaucagcaggauuaucaacaauacuucuauaucacauaauggccuggggacuagcaacauuacuaugcguagaaggagcagcaauguuauauuauccuaguguuucaaggugugaaagagguuuagaucacgcuauaccacauuacgugacaauguaucucccucuauuacuaguuuuaguugcuaaucccauauuauuucaaaaaacaguaacagcaguagcaagcuuacuaaaaggaagacaaggaauauauacagaaaaugaaagaagaaugggagcaguuauaaaaauaagauuuuuuaaaauaauguuaguauuaauaauuuguugguuaucaaacauuauaaaugaauccuuacuauuuuauuuagaaaugcaaacagauauaaacggaggaucacuaaaaccugucagaacugcagcaaaaaccacaugguucauuaugggaauacuaaacccagcacaaggauuuuuacuaucacucgcauuuuauggcuggacaggauguucauuagguuuccaaucaccaagaaaagaaauucaaugggaaucacucacaacaucagcugcugaaggagcacauccuucuccuuuaaugccucaugaaaacccugcaucaggaaaaguaucacaaguaggaggacaaacaucagaugaagcauuaucuaugcuaagugaaggcucagacgcaagcacaauagaaauacauacagcaucagaaaguuguaauaaaaaugaaggagauccagccuuaccaacacacggagacuuauaa

SEQ ID NO: 3899 - RNA, 3141 nt, Artificial Sequence
  AAH38180 variant
auggcaucaucaguaggaaacguugcugacucaacagaaccuacaaaaagaauguuaucauuucaaggacucgccgaacuugcucauagagaauaucaagcaggagauuucgaagcagcugaacgacauuguaugcaauuauggagacaagaaccugauaauacaggaguauuacuuuuauuaucaucaauccacuuucaaugcagaagacuagauagaucugcacauuucucaacguuagcaaucaaacaaaauccacuauuagcagaagcauacucaaaucuggguaacguauacaaagaacguggccaacuacaagaagcaauugagcauuauagacaugcguuaagauugaaaccagauuuuauagacggauacauuaauuuagccgcagcccucguugcagcuggagauauggaaggagcuguacaagcauauguuucagcgcuacaauauaacccagauuuauauuguguaagaucagaccuaggaaaucucuuaaaagcacuaggacgauuagaagaagcaaaagcaugcuauuugaaagcuaucgaaacacaaccaaauuuugcuguugcauggucaaaccuuggaugcguauuuaaugcccaaggagaaauaugguuagcaauccaucauuucgaaaaagcgguaacauuagacccaaauuuccuagacgcauauauuaaccuaggaaauguucuaaaagaggcuagaauauucgauagagccguggccgcuuaucuucgcgcccucaguuuaaguccaaaccaugcaguaguacauggaaaccuagcauguguauacuaugaacaaggacuuauagauuuagcuauagauacguacagacgagcuauagaacuucaaccgcauuuccccgacgcauauugcaaucuagccaaugcuuuaaaagaaaaaggaucagucgcugaagccgaagauugcuauaauacagcauuaagauuaugucccacacacgccgauaguuugaacaacuuagcaaacauuaaaagagagcagggaaauauagaagaagcaguuagacuauauagaaaagccuuagaaguuuucccugaguucgcagcugcacacaguaauuuagcgucaguccuacaacagcaagguaagcuacaagaagcacuaaugcacuacaaagaagcaaucaggaucucaccuacuuucgcugaugcauauucaaauaugggcaauacacuaaaagaaaugcaagauguucaaggagcucuacaauguuauacaagagcaauacaaauaaacccagcauucgcugaugcccauaguaaucuugcaucaauacauaaagauucaggaaacauaccagaagccauagcaucauauagaacugcuuuaaaacuaaaaccagacuuuccagacgcauacugcaaccuagcacacugucugcaaaucguaugcgauuggacagauuacgaugaaagaaugaaaaagcuaguaucuaucguagccgaucaacuugagaaaaauagauuaccuucuguccacccucaucacuccaugcucuacccacuuucucacggcuucagaaaagcaauugcugaaagacaugguaaccuuuguuuagauaaaauaaauguucuucauaaaccuccuuacgaacaucccaaagaccuaaaacuaucugacggaaggcuaagaguaggcuauguaaguucagacuucggaaaccacccaacuagccauuuaaugcaaaguauuccaggcaugcacaauccagacaaauuugaaguauucuguuaugcacuaaguccugaugacgguacaaauuuuagaguaaaaguaauggcugaagccaaccacuucaucgacuuaucgcaaauacccuguaacgguaaagcugcagaccgaauccaucaagauggaauacauauacucguaaauaugaauggcuacacaaaaggagcuagaaaugaacuauuugcauugagaccugcccccauucaagcaauguggcuaggauauccuggcaccaguggagcgcuauucauggacuauauaauaacugaccaagaaacgucgccagcagaaguagcagaacaauauucagaaaaauuagccuauaugccacauacauucuuuauaggugaccacgcuaauauguuuccgcauuuaaagaagaaagcuguuauagacuuuaaauccaauggacauauauaugacaacagaaucguacucaacgguauugaccugaaagcauuccucgauucacuaccagacguaaaaauuguaaaaaugaaaugucccgacgggggcgacaaugcggauucguccaacacggcucuaaauaugccaguaauuccgaugaacacaauagcagaagcagugauagaaaugauaaauagaggacaaauacaaauaacaauaaauggauucuccaucagcaaugggcuugcgacuacacaaaucaauaacaaagcagcaacuggagaagaagucccaaggacaauuaucguaacgacacgaucucaauacgguuuaccugaagaugcgauaguguauugcaacuucaaucaacuauacaaaauagauccaucaacauuacaaaugugggccaacauauuaaaaagaguccccaauaguguauuauggcuacuaagguucccagcaguuggagaaccaaacauacaacaauaugcacaaaacaugggucuaccccaaaaucgaauuaucuucaguccaguagcaccaaaagaggaacauguaagaagaggacaauuggcggacguaugccuagacacuccacuauguaacggacauaccacaggaauggauguacuaugggcuggcacacccaugguuacaaugccaggagaaacauuagcaagucgagucgcagccagccaauuaacuugccucggauguuuagaauuaauagccaaaaacagacaagaauaugaagacauagcagugaaauuaggcacagaucuagaauaucuaaagaaaguuagagguaaaguauggaaacaaagaauuuccucuccauuauuuaauacaaaacaauacacuauggaacuagaaagguuguaucuccagaugugggaacauuacgcagcgggaaauaaaccugaccacaugauaaaaccaguugaagugaccgaauccgcauaa

SEQ ID NO: 3900 - RNA, 441 nt, Artificial Sequence
  BAG57972 variant
auggcagcagaaacacuauuaagcagucuauuaggacuacuauuacuaggacuauuacuaccagcaucacuaacaggaggaguaggaagcuuaaaccuagaagaacuaucggaaaugagauauggaauagaaauacuaccacuaccaguaaugggaggacaaucacaaucaagcgauguaguaauagugagcucaaaauauaaacaaagauaugaauguagauuaccaguaggagcaauacacuuccaaagagaaagagaagaagaaacaccagcauaucaaggaccaggaauaccagaauuacuaucaccaaugagagaugcaccaugcuuacuaaaaacaaaagacugguggacauacgaauucuguuacggaagacauauacaacaauaucacauggaagauagcgaaauaaaaggauuacaagcagcaucaagcuaa

SEQ ID NO: 3901 - RNA, 1221 nt, Artificial Sequence
  BAG65333 variant
auggcagcagaaacacuacuaaguucauuacuaggacuacuacuacuaggacuacuacuaccagcaagucuaacaggaggaguaggaagcuuaaaccuugaagaacuaucugaaaugcgauauggaauagaaauauuaccgcuaccaguaaugggaggacaaagccaaucaagugauguuguaauagugaguucaaaauacaaacaaagauacgaaugucgcuuaccagcaggagcgauacauuuccaacgagaaagagaagaagaaacuccagcauaccaaggaccaggcauaccagaauuacuaucaccaaugagagaugcaccaugcuugcuuaaaacaaaagacugguggacauaugaauuuuguuacggaagacacauacaacaauaucauauggaagauagcgcuaguggagcaccaaacgauuuccaaaacaauguacaaguaaaaguaauaagaucaccagcagaccuaaucagauucauagaagagcuaaaaggcggaacaaaaaaaggaaaaccgaacauaggacaagagcaaccaguagaugacgcagcagaaguaccacaacgagaaccagaaaaagaacgaggugauccagaaaggcaaagagaaauggaagaagaagaagacgaggacgaggacgaagaugaagacgaagacgaacgacaacuauuaggagaauucgaaaaagagcuagaaggaauacuauuaccuucagacagagacagacuaagaagcgaagucaaagcuggaauggaaagagaacuagaaaauauaauacaagaaacagaaaaagaacuagacccagacggauuaaaaaaagaaucagaacgagauagagcaauguuagcauuaacaucaacauuaaacaaacuaauaaaaagacuagaagaaaaacaaaguccagagcuaguaaaaaaacacaaaaaaaaaagaguaguaccaaaaaaaccaccaccaucgccccagcccacgggaaaaauagaaauuaaaauaguaagaccaugggcagaaggaacagaagaaggugcaagaugguuaacagacgaagauacaagaaacuuaaaagaaauauucuuuaauauauuaguaccaggagcagaagaagcacaaaaagaaagacagagacaaaaagaacuagaaagcaauuacagacgaguaugggguaguccaggaggagaaggaacaggagaccuagaugaauuugauuucuaa

SEQ ID NO: 3902 - RNA, 2223 nt, Artificial Sequence
  BAH13933 variant
auggcaguagaaacacuacugaguucauuacuaggauuauuauuauuaggucuucuacuaccagcaucacuaacaggagguguuggaagucuaaaucuugaagaacuaagugaaaugagauacggaauagaaauauuaccauuaccaguaaugggaggacaaucgcaaagcagugacguaguaauaguaagcucuaaauauaaacaaagauaugaauguagauuaccagcgggagcaauacauuuucaaagagaaagagaagaagaaacgccugcauaucaaggaccaggaauaccagaacuauuaucgcccaugagagaugcucccugcuuauuaaaaacaaaagacugguggacauaugaguucuguuauggaagacauauacaacaauaccacauggaagacagcgaaauaaaaggagaaguacuauauuuaggauauuaccaaagugcauuugauugggaugacgaaacugcgaaagccucaaaacaacacagacucaaaagauaccauagucaaacauacggaaauggaucaaaaugcgaucuaaacggacgaccaagggaagcagaaguaagauuccucugugaugaaggagccgguauaucaggugauuauauagauaggguagaugaaccauuaagcugcagcuaugucuugacgauaagaacaccuagguuauguccacauccacugcuaaggccgccaccuagcgcagcuccgcaagcuauauuaugucauccaaguuuacaaccagaagaauacauggccuauguacagagacaagcagauucaaaacaauacggggauaaaauaauagaagaauugcaagauuuggguccacagguuuggucugaaacgaaaagugggguagcaccucagaaaauggcuggaagaacguuauuccaucuuuuccgagaaauacauuuucacuucuuuccaagcccagauuuaacaguacuuacagauugguggggagguggaggaguagaaaaauaucacggaccuucaaguuuaggagacaggggaggagaaggaacccccagcuaucuguuacccagcguaucuccauuauuaagugaucagagcuugccagucuuauguacauuaggagccucaccaacgaaagaugacaguaaagauucagauuuuuggaagauguuaaaugaaccggaagaucaagcaccaggaggagaagaaguaccggcggaagaacaagauccaucgccugaagcagcagauagcgcaucaggggcuccaaaugauuuucaaaacaauguacaagugaaaguuauaagaaguccugcugaccuaauacgauucauugaagaauuaaaaggaggaacaaagaaagguaaaccaaauaucggacaagaacaaccaguggaugaugcagcagaaguaccgcaaagagaaccagaaaaagaaagaggagaucccgaaagacaaagagaaauggaggaagaagaagacgaagaugaagaugaagaugaagaugaagaugagcgacaauugcuaggagaguucgaaaaagaacuagaagguauauuauuaccaucagacagagacagauuacgaucugagguaaaagcagguauggaaagagaacuagagaauauaauacaagaaacugaaaaagaguuagauccggacgguuuaaagaaagaaagcgaaagagauagagcaaugcucgcacuaacaucaacauuaaauaaacuaauaaaacgauuagaagaaaaacaaucaccugaguuaguaaagaaacacaaaaagaaaagaguaguuccaaagaaaccuccaccaaguccacaaccaacagaagaagauccagaacauagaguacgugugcgaguuacuaaacuaagacuaggagggccaaaccaagauuuaacgguacuggaaaugaaaagagaaaauccacaauuaaaacaaauagaagggcuagugaaagaacuucuugaaagagagggacuaacagcagcagguaaaauagaaaucaaaauaguacguccuugggcagaaggaacagaagaaggagcaagauggcuaacagacgaggauacacgaaauuugaaagaaauauucuuuaauauacucgucccaggcgcagaagaggcgcaaaaagagcgacaacgacaaaaagaauuagaaaguaauuauagacgaguauggggaucaccaggaggagaaggaacgggagaucuagaugaguuugacuuuuga

SEQ ID NO: 3903 - RNA, 2004 nt, Artificial Sequence
  AAB06495 variant
auggcagcugaaacauuacuaucaucacugcuaggauuguuacugcuaggauuacuauuaccagccucgcugacaggaggaguaggaagccuuaauuuggaagaauuaagugagaugagauauggcauagaaaucuuaccauuaccaguuaugggaggucaaagucaaucgucagauguaguaauaguaaguagcaaauauaaacaaagauaugaauguagacuaccagccggugcaauacacuuccaaagagaaagagaagaagaaacaccagcauaucaaggcccaggaauaccagaauuacuaaguccaaugagagaugcaccaugucuacucaaaacuaaagacugguggacuuacgaguucugcuauggaagacauauucaacaguaccauauggaagauagugaaauaaaaggggaaguauuauauuuaggauauuaucagucugcauuugauugggaugacgaaacugcaaaggcaagcaaacaacaucgauuaaagagguaucauagucaaacauauggaaacggaagcaaaugugacuuaaauggcagaccgagagaagcagaaguaagauuucuaugugacgaaggagcaggaaucucaggagacuauauagacagagucgaugaaccauuaaguuguucauauguauuaacaauaagaacaccaagauuauguccgcauccuuuauugagaccaccuccaucagcagcuccacaagcaauucuaugucacccuaguuuacaaccagaagaauauauggcauacguacaaagacaagcagacucaaaacaauacggagauaaaauuauugaagaauuacaagauuuaggaccacaaguuuggucugaaacuaaaaguggaguagcaccucagaaaauggcgggugcaucaccuacaaaagaugauaguaaagauucagacuuuuggaaaaugcugaaugaaccggaagaucaagccccaggaggugaggaagucccugcagaagaacaagauccaagcccggaagcagcagauagugcgaguggcgcuccaaaugauuuucaaaacaacguacaaguaaaaguuauaagaaguccagcagaucuaauaagauuuauagaagaauugaaaggaggaaccaagaaaggaaaaccaaauauuggacaagaacaaccaguagaugaugcggcugaagucccacaaagagaaccggaaaaagagagaggagauccagaaagacaaagagaaauggaagaagaagaagacgaagacgaagacgaagacgaagaugaagaugaaagacaacuucuaggagaauuugaaaaagaauuagaagguauacuauugccaagcgauagagacaggcuaagaucagaagucaaagcaggaauggagagagagcuugaaaauauuauacaagaaacagaaaaagaauuagacccagauggucuaaagaaagaaagugaaagggauagagcaauguuagcacuuaccagcacauuaaauaaguuaauaaaaagauuagaagaaaaacaaucaccugagcuuguaaagaaacauaaaaagaaacgaguagugccaaagaaaccaccgccaagcccucaaccaacagaagaagacccagaacauagagugagagugagaguaacaaaauuaagguuaggaggaccgaaucaagaucuaacuguuuuagaaaugaaacgugaaaacccacaacuaaaacaaauugaaggccuaguaaaagaauuacuagaacgagaaggauuaacagcagcagggaaaauugaaauaaaaauaguacgacccugggcugaaggaaccgaagaaggggcaagauggcuaacagaugaagacacaagaaacuuaaaagaaauauucuuuaauauauuaguaccaggagcagaagaggcucaaaaagagagacaaagacaaaaagaacuagaaucaaauuauagaagaguuugggguaguccgggaggugagggaacaggagaucuugaugaauuugauuucuga

SEQ ID NO: 3904 - RNA, 303 nt, Artificial Sequence
  AAI13433 variant
augagagcacuaacacuauuagcauuacuagcacuagcagcauuaugcauagcaggacaagcaggagcaaaaccaagcggagcagaaagcucaaaaggagcagcauucguaagcaaacaagaaggaucagaaguaguaaaaagaccaagaagauacuuauaccaaugguuaggagcaccaguaccauauccagauccacuagaaccaagaagagaaguaugcgaacuaaauccagauugcgaugaauuagcagaucacauaggauuucaagaagcauauagaagauucuauggaccaguauaa

SEQ ID NO: 3905 - RNA, 945 nt, Artificial Sequence
  EAX06008 variant
augaggauagcaguaauaugcuucugcuuacuaggcauaaccugugcaauacccguaaaacaagcugacucaggaucauccgaagaaaaacaacuauacaacaaauauccagacgcaguagcaacauggcuaaaccccgaucccucacaaaaacaaaaucuacuagcaccacaaaacgcaguauccucagaagaaacaaaugacuucaaacaagaaacacuaccaucaaaaucaaaugaaucacacgaccacauggacgacauggacgacgaagacgaugacgaccacguagacagccaagacucaauagauucaaacgacucagacgacgucgaugacacagacgacucacaccaaucagacgaaucacaccacagcgacgaaucagaugaacuaguaacagacuucccaacagaccuaccagcaacagaaguauuuacaccaguaguaccaacaguagauacauaugacggaagaggagacucaguaguauacggauuaagauccaaaucaaaaaaauuccgaagaccagacauacaauacccagacgcaacagacgaagacauaacaagucacauggaaucagaagaacuaaacggagcauacaaagcaaucccaguagcacaagaccuaaaugcaccaucagacugggacucaagaggaaaagacagcuacgaaacaucccaacuagaugaccaaucagcagaaacccacucacacaaacaaagcagacuauacaaaagaaaagccaacgacgaaagcaacgaacacucagaugucauagauucacaagaauuaucaaaaguaucaagagaauuccacucccacgaauuucacucacacgaagacaugcuaguaguagacccaaaaagcaaagaagaagacaaacaucuaaaauucaggauaucacacgaauuagacucagcaagcagcgaaguaaauuaa

SEQ ID NO: 3906 - RNA, 903 nt, Artificial Sequence
  EAX06009 variant
augcgaauagcaguaauaugcuucugccuacuaggaauaacaugcgcaauaccaguaaaacaagcagacucaggaucaucagaagaaaaacaauuauacaacaaauacccagacgccguagcaacauggcuaaacccagaccccucccaaaaacaaaaucuacuagcaccacaaacacucccaucaaaaucaaaugaaucacacgaccacauggaugacauggacgacgaagacgacgacgaccacguagauucacaagacucaauagacucaaacgacucagacgacguagacgacacagacgacucacaccaaucagacgaaucacaccacagcgacgaaucagacgagcuaguaacagacuucccaacagaccuaccagcaaccgaaguauucaccccaguaguacccacaguagacacauacgacggaagaggagauucaguaguauacggccuaagaagcaaaucaaaaaaauucagaagaccagacauacaauacccagacgcaacagacgaagacauaacaucacacauggaaucagaagaauuaaacggagcauauaaagcuauaccaguagcacaagauuuaaacgcaccaucagacugggacucaagaggaaaagacucauacgaaacaagccaacuagaugaccaaagugcagaaacacacucacacaaacaaucaagacuauacaaaagaaaagcaaacgacgaaagcaacgaacacucagacguaauagacucacaagaauuaucaaaaguaagcagagaauuccacucacacgaauuucacucacacgaagauauguuaguaguagacccaaaaucaaaagaagaagacaaacaucuaaaauucagaauaucacaugaacuagacucagcaagcucagaaguaaacuaa

SEQ ID NO: 3907 - RNA, 864 nt, Artificial Sequence
  EAX06010 variant
augagaauagcaguaauaugcuucugccuacuaggaauaacaugcgcaauaccaguaaaacaagcagacucaggaucaagcgaagaaaaacaaaacgcaguaagcucagaagaaacaaacgacuucaaacaagaaacauuaccaucaaaaaguaacgaaucucacgaccacauggacgacauggacgacgaagaugacgacgaccacguagacucacaagauuccauagauucaaacgacucagacgacguagaugacacagacgacucacaucaaagcgacgaaucacaccacucagacgaaucagacgaacuaguaaccgacuucccaacagauuuaccagcaacagaaguauuuacaccaguaguaccaaccguagacacauacgacggaagaggagacucaguaguauacgguuuaagaucaaaaucaaaaaaauuucgaagaccagacauacaauacccagacgcaacagaugaagacauaacaucacacauggaauccgaagaacuaaacggagcauacaaagccauacccguagcacaagaccuaaacgcaccaucugacugggacucaagaggcaaagacucauacgaaacaucacaacuagacgaccaaucagcagaaacacacucacauaaacaaucaagacuauauaaaagaaaagcaaacgaugaaaguaacgaacacagcgauguaauagacucccaagaacuaucaaaaguaucaagagaauuccacucacaugaauuucacagccacgaagacauguuagucguagacccaaaaucuaaagaagaagauaaacaccuaaaauucagaauaucacacgaauuagacucagcaucauccgaaguaaacuaa

SEQ ID NO: 3908 - RNA, 984 nt, Artificial Sequence
  BAH12087 variant
augggaauagucccaagaucacuagauaaaaaagcacacagaguacaauuccaacuaaacagaauaaaagcaaaaauagaacuaccaugggggucacuacaacuagauuguuuaaugaaaacacuaaaagaacucuacaacaaauaucccgacgcagucgcaacauggcuaaacccagacccaagucaaaaacaaaaccuacuagcaccacaaaaugcaguaucaucagaagaaacaaaugauuucaaacaagaaacacuaccaucaaaaaguaacgaaagccacgaccacauggacgacauggacgacgaagacgacgacgaccauguugacucacaagacucaauagacucaaaugacagcgacgacgucgacgauacagaugacucacaccaauccgacgaaagccaccacucagacgaaucagaugaacuugucacagacuuuccaaccgaccuaccagcaacagaaguauucacaccaguaguaccaacaguagacacauacgacggaagaggagacucagucguauacggacuuagaagcaaaucaaaaaaauucagaagaccagacauacaauacccagacgcaacagacgaagacauaacaucacacauggaaucagaagaguuaaacggagcauacaaagcaauaccaguagcacaagaccuaaacgcaccaucagauugggacucaagaggaaaagacucauacgaaacaucacaacuagacgaucaaucagcagaaacacacagccacaaacaauccagacucuacaaaagaaaagcaaacgacgaaucaaacgaacacucagacguaauagacucacaagaacuaucaaaaguaucaagagaauuccauucacacgaauuccacagccacgaagacauguuaguaguagacccaaaaucaaaagaagaagacaaacacuuaaaauucagaaucagccacgaacuagauucagcaagcuccgaaguaaauuaa

SEQ ID NO: 3909 - RNA, 879 nt, Artificial Sequence
  AEA49030 variant
augagaaucgcaguaauaugcuucugcuuacuaggaauaaccugcgcaauaccaguaaaacaagcagacucaggaucuucagaagaaaaacaauuauacaacaaauacccagacgcaguagcaacaugguuaaacccagaccccucacaaaaacaaaaccuauuagcaccccaaaacgcaguaucaucagaagaaacaaacgacuuuaaacaagaaacauuaccaucaaaaucaaacgaaagccacgaccacauggacgacauggacgacgaagacgacgauucacaccaaucagaugaaucacaccacucagacgaaucagacgaauuaguaacagacuucccaacagaucuacccgcaaccgaagucuucacaccaguaguaccaacaguagacacauacgacggaagaggcgacucagucgucuacggacuacgcucaaaaagcaaaaaauucagaagaccagacauacaauauccagaugcaacagacgaagacauaacaucacacauggaaucagaagaacuaaacggagcauacaaagcaauaccaguagcacaagacuuaaacgcaccaucagauugggacagcagaggaaaagacucauaugaaacaucacaacuagacgaccaaucagcagaaacacacucacacaaacaaucaagacuauacaaaagaaaagccaacgacgaaucaaacgaacacucagacguaauagacucccaagaacuaagcaaaguaucaagagaauuccacagccacgaauuccacagccacgaagacauguuaguaguagacccaaaaucaaaagaagaagacaaacaucuaaaauucagaauaucacacgaacuagacucagcauccucagagguaaacuaa

SEQ ID NO: 3910 - RNA, 945 nt, Artificial Sequence
  AAA86886 variant
augagaauagcaguaauaugcuucugcuuacuaggaauaacaugcgcaauaccaguaaaacaagcagauucaggcucaucagaagaaaaacaacuauauaacaaauacccagaugcagucgcaacaugguuaaauccagauccaucacaaaaacaaaaccuacuagcaccacaaaaugcaguaagcagcgaagaaacaaacgacuucaaacaagaaacauuaccaucaaaaucaaaugaaucacacgaccacauggacgauauggacgacgaagaugacgaugaccacguagauagccaagacagcauagacucaaacgauuccgacgacguagacgacacagacgacagucaucaaucagaugaaagccaccacucagacgaaucagaugaauuaguaacggacuuuccaacagaccuaccagcaacagaaguauucacaccaguaguaccaacaguagauacauacgacggaagaggagacucaguaguauacggauuaagaucaaaaaguaaaaaauucagaagaccagacauacaauacccagacgcaacugaugaagauauaacaucccacauggaaagcgaagaauuaaacggagcauauaaagcaauaccaguagcacaagacuuaaacgcaccaucagacugggacucaagaggaaaagacucauacgaaacaucacaacuagacgaccaaucagcagaaacacacucccacaaacaaucaagauuauacaaaagaaaagcuaacgacgaaaguaacgaacacucagacgucauagauagccaagaacuaucaaaaguaucacgagaauuccacagccaugaauuucauucacacgaagauauguuaguaguagacccaaaaagcaaagaagaagacaaacaucuaaaauuuagaauaucacaugaacuagacucagcaucaucagaaguaaacuaa

SEQ ID NO: 3911 - RNA, 1182 nt, Artificial Sequence
  AAA59988 variant
auggaagaaccacaaucagaccccucaguagaaccaccacuaucucaagaaacauucucagaccuauggaaacucuuacccgaaaacaacguacuaucaccacuaccaagucaagcaauggaugaucuaaugcuaucuccagaugacauagaacaaugguucaccgaagaccccggaccagacgaagcgcccagaaugccagaagccgcaccaccaguagcacccgcaccugcagcuccaacaccagcagcaccagcaccagcaccaucuuggccacuuuccucaucuguaccaucacaaaaaacuuaccaaggaucauacggauucagauuaggauuccuacacucagguacagcaaaauccguaacauguaccuacagucccgcacuaaacaaaauguuuugucaacuagcaaaaacaugcccaguacaauuauggguagacagcacaccaccacccggaacaagagucagagcaauggcuaucuacaaacaaucucaacacaugacagaagucgucagaagaugcccacaccacgaaagauguucagacucagacggauuagcuccaccucaacaucuaauaagaguagaagguaaccuacgaguugaauaccucgacgauagaaacacuuuccgacacucagucguaguuccauacgaaccaccagaaguaggcucagacugcacaacaauacacuauaacuauauguguaacaguaguugcaugggagguaugaacagaagaccaauauuaacuauaaucacccuagaagacucaucaggaaacuuauuaggaagaaauucuuucgaagucagaguaugcgccugcccaggacgcgacagacgaacagaagaagaaaaccuaagaaaaaaaggagaaccucaucacgaauuaccaccaggaucaacaaaaagagcacuaccaaacaacacauccucaaguccgcaaccaaaaaaaaaaccacucgacggcgaauacuucacucuacaaaucagaggaagagaacgcuuugaaauguuuagagaacuaaacgaagcacuagaacuuaaagaugcacaagcagguaaagaaccaggaggcucaagagcacacucaucacaccuuaaaucaaaaaaaggacaaucuacaucaagacacaaaaaacuaauguucaaaacagaaggaccagacucagauuaa

SEQ ID NO: 3912 - RNA, 309 nt, Artificial Sequence
  AAF88037 variant
augagcgcaagaguaagaucaagaucaagaggaagaggagacggacaagaagcaccagacguaguagcauucguagcaccaggagaaagccaacaagaagaaccaccaacagacaaucaagauauagaaccaggacaagaaagagaaggaacaccaccaauagaagaaagaaaaguagaaggagacugucaagaaauggaucuagaaaaaacaagaucagaaagaggagauggaucagacguaaaagaaaaaacaccaccaaacccaaaacaugcaaaaacaaaagaagcaggagauggacaaccauaa

SEQ ID NO: 3913 - RNA, 1209 nt, Artificial Sequence
  AAA60003 variant
augcaaaugucaccagcacuaacaugucuaguacuaggucuagcccuaguauuuggagaaggaagugcaguacaccauccgccuagcuacguagcacacuuagcaagugacuucgguguccgaguauuccaacaaguagcacaagccaguaaagacagaaacguaguauuuucaccauauggaguagcaucaguacuagcaauguuacaauugacaacaggaggagaaacacaacaacaaauacaagcagcaaugggauuuaaaauagacgauaaaggaauggcaccagcauuaagacacuuauacaaagaacuuaugggaccauggaacaaagacgaaauuucaacaacagacgcaauauuuguacaaagagauuuaaaacucguucaagguuucaugccacacuucuuccgccuauucagaaguacaguaaaacaaguagacuucucagaagucgaacgagcaagauucaucauaaacgacugggucaaaacacacacaaaaggaaugauaaguaaccuacuaggaaaaggagcaguagaccaacuaacaagacucguucuaguaaacgcacuauacuucaauggccaauggaaaacaccauuucccgauuccucaacucacagaagacuauuucauaaaagugacggaucaacaguaucaguaccaaugauggcacaaacaaauaaauuuaauuauaccgaauuuacaacacccgacggccacuauuacgacauacuagaauuaccuuaccauggagacacacuaucaauguuuauagcagcaccauaugaaaaagaaguaccacuaucagcacuaacaaacauacuauccgcacaauuaauaucucauuggaaaggaaacaugaccagauuaccacgauuauuaguacuaccaaaauucagccuagaaacagaaguagaucuaagaaaaccacuagaaaaucuaggaaugacagacauguucagacaauuccaagcagacuucacaucccuaucagaccaagaacccuuacacguagcacaagcacuacaaaaagucaaaauagaaguaaaugaaucaggaacaguagcaucaucauccacugcaguaaucguaucagcuaggauggcacccgaagaaauaaucauggacagaccauuucucuucguaguaagacauaauccaacaggcacaguacuauucauggggcaaguaauggaaccauaa

SEQ ID NO: 3914 - RNA, 1248 nt, Artificial Sequence
  AAA36797 variant
auggaagaccuuugcguagcaaacacacucuuugcacucaacuuauucaaacacuuagcaaaagccaguccuacacaaaacuuauucuuaaguccuuggucaauaagcucaacaauggcaaugguauauaugggaucaagaggaucaacagaagaucaaauggcaaaaguacuucaauucaacgaaguaggagcaaacgccguaacaccaaugacaccagaaaauuucacaucaugcggcuucaugcaacaaauacaaaaaggaucauacccagaugcaauucuacaagcacaagcagcagauaaaauacacagcuccuuccgaagccuaaguucagcuauaaacgcaagcacuggaaacuaucuacuagaaagcguuaacaaacuauucggagaaaaaucagcaucauucagagaagaauacauaagacuaugccaaaaauacuauaguucagaaccccaagcaguagacuuccuagaaugcgcagaagaagcacgaaaaaaaauaaacagcuggguaaaaacacaaacaaaaggaaaaauaccaaaccuacuaccagaaggaucaguagacggagacacaagaaugguauuaguaaaugcagucuauuuuaaaggaaaauggaaaacaccguuugaaaaaaaacuaaacggacuauacccauuuagaguaaacucagcacaaagaacaccaguacaaaugauguaccuaagagaaaaauuaaacauagguuacauagaagacuuaaaagcacaaauacuagaauuaccauacgccggagacguaagcauguuucuauuacuaccagacgaaauagcagacguaucaacaggauuagaacuauuagaaucagaaauaacauaugauaaacuaaacaaauggacaucaaaagacaaaauggcagaagacgaaguugaaguauacauaccacaauuuaaacuagaagaacauuacgaauuaagaucaauacuaagauccaugggaauggaagacgcuuuuaacaaaggaagagcaaacuucucaggaaugagugaaagaaaugauuuauuucuaucagaaguauuucaccaagcaaugguagacguaaacgaagaaggaacagaagcagcagcaggaacuggaggaguaaugacaggaagaacaggacacggaggaccacaauucguggcagaccacccauuuuuauucuuaaucaugcauaaaauaacuaacugcauacuauuuuucggaagauucaguucaccauaa

SEQ ID NO: 3915 - RNA, 528 nt, Artificial Sequence
  AAA60020 variant
auguuaccaccaauggcacuaccaagcguaaguuggauguuacuaucaugcuuaauguuacuaucacaaguacaaggagaagaaccacaaagagaacuaccaagcgcaagaauaagauguccaaaaggaucaaaagcguacggaagccauugcuaugcauuauucuuaagcccaaaaucauggacagacgcagaccuagcaugccaaaaacgaccaucaggaaacuuagucucaguauuaagcggagcagaaggaucauucguaagcucauuaguaaaaucaauaggaaauucauacucguacguauggauaggauuacaugauccaacacaaggaacagaaccaaauggagaaggaugggaauggagcucaagcgauguaaugaacuauuucgcaugggaaagaaauccaucaacaauaagcucaccaggacauugugcaucucuaucaagaucaacagcauucuuaagauggaaagauuacaauugcaauguaagacuaccauacguaugcaaauucacagacuaa

SEQ ID NO: 3916 - RNA, 528 nt, Artificial Sequence
  AAT11159 variant
auguuaccaccaauggcacuaccaagcguaagcuggaugcuacuaucaugccuaauguuacuaucacaaguacaaggagaagaaccacaaagagaauuaccaagcgcaagaauaagauguccaaaaggaucaaaagcauacggaagccauugcuaugcauuauucuuaagcccaaaaucauggacagacgcagacuuagcaugucaaaaacgaccaagcggaaacuuaguaucaguauuaaguggagcagaaggaucauucguaaguagucuaguaaaaucaauaggaaacucauacucauacguauggauaggauuacacgauccaacacaaggaacagaaccaaauggagaaggaugggaauggucaucaucagauguaaugaacuauuucgcaugggaaagaaauccaucaacaauaaguucaccaggacacugugcaucacuaucuagaucaacagcauucuugagauggaaagauuacaauugcaaugucagacuaccauacguaugcaaauucacagacuaa

SEQ ID NO: 3917 - RNA, 381 nt, Artificial Sequence
  AAH39863 variant
auggauaaaucacuauuacuagaacuaccaauauuacuauguugcuuuagagcacuaucaggaucacuaucaaugagaaacgaugcaguaaacgaaauaguagcaguaaaaaauaacuuuccaguaauagaaauaguacaauguagaaugugccaucuacaauucccaggagaaaaauguagcagaggaagaggaauaugcacagcaacaacagaagaagcaugcaugguaggaagaauguucaaaagagauggaaauccaugguuaacauucaugggaugucuaaaaaacugugcagauguaaaaggaauaagauggagcguauacuuaguaaauuucagaugcuguagaucacacgaucuauguaacgaagacuuauaa

SEQ ID NO: 3918 - RNA, 1440 nt, Artificial Sequence
  CCDS42826.1 variant
augacaacccuagcuggagccgucccaagaaugaugagaccaggaccaggccaaaacuacccuagaucuggauucccacuagaaguaucaacaccacuuggacaaggacgaguaaaucaacuaggaggaguuuuuauaaacggaagaccuuuaccaaaucauauaagacacaaaaucguagaaauggcccaucauggaaucagaccaugcguaauuuccagacaacuaagaguaucacauggaugcguaucuaaaauucuauguagauaucaagaaaccgguucaaucagaccaggagccauaggaggguccaaaccaaaacaaguaacuacaccagacguagaaaaaaaaaucgaagaauacaaacgagaaaauccaggaauguuuuccugggaaauaagagacaaacuauuaaaagaugcaguaugcgauagaaacacaguacccucaguuuccuccauaucaagaauauuaagaucaaaauucggaaaaggagaagaagaagaagccgacuuagaaagaaaagaggcagaagaaucagaaaaaaaagcaaaacacuccauagauggaauacuaucagaacgcgcaucugcaccacaaucagaugaagguucugacauagauucagaaccagacuuaccacuaaaacgaaaacaaagacgaucgagaacaaccuucacagcagaacaacuagaagaauuagaaagagcauucgaaagaacacauuacccagauauauacacacgagaagaauuagcacaaagagccaaacuaacagaagccagaguacaaguaugguucucaaacaggagagccagauggagaaaacaagcuggagcaaaccaacuaauggccuuuaaucaccuaaucccaggaggauuuccaccuaccgcuaugccuacauuaccaacauaucaauuauccgaaacaucauaccaaccuacuucuauaccacaagcugucucugaccccagcaguacaguccauagaccacaacccuuaccaccaagcacgguacaccaaucaacaauucccucuaacccugauagcucaucagcuuacugucuaccaucaacccgacauggauucagcucauauacugauuccuuuguacccccaaguggaccaucaaacccuaugaacccuacaauaggaaacggucuaucaccacaagucaugggccucuuaacuaaucacggcgguguaccacaccaaccccaaacugacuacgcauuaucaccauuaacaggaggacuagaaccaacaacaacaguuucugcauccuguucacaaagacuagaccacaugaaaucucuagacucacuaccaaccucacaaagcuacuguccaccaacauacucuacaacuggauauuccauggauccaguaacaggauaucaauacggucaauacggucaaucuaaaccauggacuuucuag

SEQ ID NO: 3919 - RNA, 1176 nt, Artificial Sequence
  AAA58397 variant
auggaccuagaaaaaaacuauccaacaccuagaacuucaagaacaggccauggaggcguaaaccaauuaggaggaguauuuguaaacggaagaccucuuccagacguuguaagacaaagaauaguugaauuagcacaucaaggaguaagaccaugcgacauaagcaggcaauuaagagucucacacggauguguaucuaaaauucuaggacgcuacuaugaaacagguuccauaaaaccaggaguaauaggaggcucaaaaccaaaaguagcaacaccaaaaguaguagaaaaaauagcugaauacaaaagacaaaacccaacaauguuugcaugggaaauaagagacagauuacuagcagaacgagucugugacaaugacacagucccaucaguaucaucaauaaauagaauaauucgaacaaaaguacaacaaccaccaaaucaaccaguuccagcaucaucacacuccaucgucucaaccgguucaguuacucaaguaucaucuguuucaaccgacagugcaggaucguccuacucaauaucaggaauauuaggaaucacuuccccaucagcagauacuaacaaacgaaaaagagaugaaggcauacaagaauccccaguaccaaacggucacucacuaccaggccgagacuuccuacgaaaacaaaugagaggagacuuauucacacaacaacaacuagaaguucuagaccgaguauucgaaagacaacacuauucagauauauuuaccacuacagaaccaauaaaaccagaacaaacaacugaauauucugcaauggcaucauuagcaggcgguuuagacgacaugaaagcaaaccuugcauccccaacaccugcagacauaggauccuccgucccuggaccacaaucauauccaauuguaaccggaagagauuuagcaucaacuacucuaccaggauacccaccucacguacccccagcaggacaaggaucauauucagcaccaacauuaaccggcaugguaccaggaucagaauuuucaggaaguccauauucacauccacaauacucaucguauaacgauucauggagauuuccaaauccaggacuauuaggaucaccauauuacuacucagcagcagcaagaggagcagcuccaccagccgcagcaacagccuaugaccgacauuaa

SEQ ID NO: 3920 - RNA, 873 nt, Artificial Sequence
  AAF25807 variant
augagaauauuugcaguauucaucuucaugacauacuggcacuuauuaaacgcauucaccguaacaguaccaaaagaccucuacguaguagaauacggaucaaacaugacaauagaaugcaaauuuccaguagaaaaacaacuagacuuagcagcacuaauagucuacugggaaauggaagacaaaaauauaauacaauucguacacggagaagaagaccuaaaaguacaacacucuucauacagacaaagagcaagacuccuaaaagaucaacuaucauuaggaaacgcagcacuacaaauaacagacgucaaauuacaagacgcaggcguauacagaugcaugauaucauacggaggagccgacuacaaaagaaucacaguaaaaguaaacgcacccuacaacaaaauaaaccaaagaauacucguagucgacccaguaaccucagaacacgaacuaacaugucaagcagaaggauacccaaaagcagaaguaauauggacaucaagcgaccaccaaguauuaucaggaaaaacaacaacaacaaacagcaaaagagaagaaaaacuauucaauguaacaagcacacuaagaauaaacacaacaacaaacgaaauauucuacugcacauucagaagauuagacccagaagaaaaucacacagcagaauuaguaauaccagaauuaccacucgcacacccaccaaacgaaagaacacacuuagucauacuaggugcaauacuacuaugcuuaggaguagcacuaacauucauauuuagauuaagaaaagguagaaugauggauguaaaaaaaugcggaauacaagacacaaacucaaaaaaacaauccgacacacauuuagaagaaacauaa

SEQ ID NO: 3921 - RNA, 867 nt, Artificial Sequence
  AAH74740 variant
augcaaauaccucaagcaccauggccaguagucugggcuguauuacaacuaggauggagaccaggaugguuuuuagauagcccagacagaccauggaauccaccaacuuuuucaccagcacuuuuaguaguaacagaaggagauaaugccacauuuacaugcucauuuucaaauacuucagaaaguuuuguucuaaauugguauagaaugucaccaucaaaccaaacagacaaauuagcagccuucccugaagauagaucacaaccaggacaagauuguagauuuagaguaacacaauuaccuaacggaagagauuuccauaugaguguaguaagagcacguagaaaugauaguggaacauauuuauguggagcaauaucauuagcaccaaaagcacaaauaaaagaaucauuaagagcagaacuaagaguaacagaaagaagagcagaaguuccaacagcacauccaucacccucaccaagaccagcaggucaauuucaaacauuaguaguaggaguaguaggagguuuauuaggaucacuuguauuacuagucuggguacuagcuguaauaugcucaagagcagcaagaggaacaauaggagcaagaagaacaggucaacccuuaaaagaagauccuucagcaguaccaguauucucaguagacuauggagaauuagauuuucaauggagagaaaaaacaccagaaccuccaguaccauguguaccugaacaaacagaauaugccaccauaguauucccaaguggaaugggaacuaguaguccagcuagacgagguucagcagauggaccacgaagcgcacaaccauuaagaccagaagauggacauugcaguuggccauuauaa

SEQ ID NO: 3922 - RNA, 1008 nt, Artificial Sequence
  AAC95296 variant
augggaucagcaucaccaggauuaaguagcguuucaccaagucaucuacuauuaccaccagauacaguaagcagaacaggcuuagaaaaagcagcagcaggagcaguaggacuagaaagaagagacuggucaccaucaccaccagcaaccccagaacaaggauuaucagcauuuuaucuaucauacuuugacaugcucuauccagaagacagcaguugggcagcaaaagcaccuggagcauccucacgagaagaaccaccagaagaaccagaacaauguccaguaauagacagucaagcaccagcaggaaguuuagacuuaguaccaggcggacuaaccuuagaggaacauucacuagaacaaguccaaucaaugguaguaggagaaguauuaaaagauaucgaaacagcaugcaaacucuuaaacauaaccgcagauccaauggacuggucaccaaguaacguacaaaaaugguuacuauggacagaacaccaauacagacuuccaccaaugggaaaagcauuucaagaauuagcuggaaaagaauuaugcgcaaugucagaagaacaauuuagacaaaggucaccauuaggaggagauguguuacaugcacaucuagauauauggaaauccgcagcauggaugaaagaaagaacaaguccuggagcaauacauuauugugccucaacaucagaagaaucauggacagauucagaaguagacagcucaugcucaggacaaccaauacacuuauggcaauucuuaaaagaacuauuacuaaaaccacauagcuauggaagauucauuagauggcuaaauaaagaaaaaggaauauucaaaauagaagauagcgcacaaguagcaagacuauggggcauacgaaaaaacagaccagcaaugaauuaugauaaauuauccagaaguauacgacaauauuacaaaaaaggaauaauaagaaaacccgacauaagccaacgauuaguauaucaauuuguacaucccauauaa

SEQ ID NO: 3923 - RNA, 2217 nt, Artificial Sequence
  AAA36429 variant
augcaaccaagaugggcccagggagccacaaugugguuagguguauuauuaacacuauuauuauguagcucccuagaaggacaagagaauagcuuuacaauaaacagcgucgauaugaaaucauuaccagacuggacuguccaaaaugguaaaaaccuuacacugcaaugcuucgcagacguaaguacaaccucacacguaaaaccucaacaccaaauguuauuuuacaaagacgacguacuauucuacaacauaaguucaaugaagucaacugaaucauacuucauacccgaaguaagaauauacgacagcggaacauauaaauguacuguuaucguaaauaacaaagaaaaaaccacagcagaauaucaauuacucgucgaaggaguaccaaguccacgaguaacacuggacaaaaaagaagcuauacaaggaggaauaguaagaguaaacuguucaguaccagaagaaaaagcaccuauacauuuuacaauagaaaaacuagaauuaaaugaaaaaaugguaaaauuaaaacgagaaaaaaacaguagagaucaaaacuucguaauauuagaauuuccaguagaagaacaagauagaguuuuaagcuuuagaugucaagcuagaaucauuucugguauccauaugcaaacaucagaauccacaaaaagugaacuaguaaccgucacagaauccuucucuaccccaaaauuccauauauccccaacaggaaugauaauggaaggagcccaauuacauauaaaauguacaauacaaguaacacaccucgcacaagaauuuccagaaauuaucauccaaaaagacaaagcaauaguagcccacaauagacacggaaauaaagcagucuacucaguaauggccaugguagaacacucaggcaacuacacaugcaaagucgaauccucaagaauaagcaaaguaucaagcauaguagugaauauaaccgaauuauucucaaagccagaacuagaaucaucauuuacacaccucgaccaaggcgaacguuuaaacuuaucauguuccauuccaggagcaccaccagccaacuucacgauacaaaaagaagauacaaucguaucgcaaacccaagacuuuacaaaaauagcaaguaaaagcgacaguggcacauacauauguacagccggcaucgauaaagucgucaaaaaaucaaauacaguccaaauaguaguuugcgaaauguuaucacaaccaagaauuuccuacgacgcccaauucgaaguaauaaaaggucaaacuaucgaagucagaugugaaucaauaaguggaacauuacccauaucauaucaauuacuaaaaacaagcaaaguacuggaaaacuccacgaaaaacuccaacgacccugcaguuuucaaagacaaucccacagaagacguugaauaucaaugcguagcagauaacugccauucacaugccaagaugcuauccgaaguacuucgagucaaaguuauagcccccgucgacgaaguacaaauuaguauacuaucaaguaaaguuguagaaucaggagaagacauagucuuacaaugcgcaguuaacgagggcucuggaccaaucacauauaaauuuuaccgugaaaaagaaggaaaaccauucuaucaaaugacaagcaaugccacccaagcauuuuggacaaaacaaaaagcaucaaaagaacaagaaggugaauauuacuguacugcauucaacagagcaaaccaugccucaagcguaccucgcucaaaaaucuuaaccguucgcguuauacuugcacccuggaaaaaaggucuaaucgcagucguuauaauaggaguaauaauugcacuacuaauaauagcagcaaaauguuacuuucuuagaaaagcaaaagccaaacaaaugccagucgaaaugucaagaccugcagucccucuauuaaauucuaacaaugaaaaaaugucagacccgaauauggaagcaaauucacacuacggacacaacgacgacgucagaaaccacgcaaugaaaccuauaaacgacaauaaagaaccauuaaacucugauguacaauauacagaaguacaagucucaagcgcagaaagucauaaagaccuaggcaaaaaagauacugaaacaguauacucugaaguucgaaaagcaguaccggacgcagucgaaagcagauacaguagaaccgaagguucacuagacggcaccuaa

SEQ ID NO: 3924 - RNA, 2736 nt, Artificial Sequence
  AAG23134 variant
auggcacaacuauuuuuaccauuauuagcagcucuaguacuagcgcaagcaccagcagcuuuagcagauguauuagaaggagauuccagcgaagaucgagcauuccgagucagaauagcgggagacgcuccacuacaaggaguuuuaggaggagcucuaaccauaccaugucauguacauuaucuuagaccaccuccaucuaggagagcuguucuaggaagucccagaguuaaauggacauuuuuaucaagaggaagagaagcugaaguacuuguugcaagaggaguuagaguaaaagucaaugaagcauauagauucagaguagcuuuaccagcauacccagcaagccuaacugacguaucucuugcacuuucagaacuaagaccaaacgauaguggaauuuacagaugugaaguacaacacgguauagacgauucaucagaugcgguugaaguaaaaguaaaggguguaguauuccuauauagagaaggaucggcaagauacgcauucuccuucaguggagcacaagaagcaugcgcccguauaggugcucacauagcaacaccagaacaacuuuacgcagcauacuuagggggauacgaacaaugugaugcuggauggcuaagugaucagacuguuagauauccaauacaaacaccuagagaagcaugcuacggggauauggauggauucccaggaguaagaaauuacggaguuguagacccagacgauuuauaugacgucuacugcuaugcggaagauuugaauggagaauuauuuuuaggagauccaccagaaaaguuaacacuagaagaagcucgagcuuauugccaagaaagaggcgcagaaauagcuacaacuggacagcuauacgcagcaugggauggaggauuagaucauugcuccccagggugguuagcugauggaucaguacgauaucccauaguaacaccaagccagcgaugcggaggagguuuaccggguguaaaaacauuauuuuuguuuccuaaccaaacaggauuuccuaauaagcacagcagauucaaugucuauuguuuuagagauuccgcgcaaccaagcgcaauaccagaggcuaguaaucccgccucaaauccagcaagcgauggauuggaagcaauagugacaguaacagaaacuuuagaagaauuacaacuaccacaagaagcgaccgaaucagaaucaagaggagcaaucuauucaaucccaauaauggaagaugguggcggaggaaguucaacaccagaagauccagcagaagcaccuagaaccuuguuagaguucgaaacacaaucgaugguaccaccaacagguuucagugaagaggaagguaaggcguuagaagaagaagaaaaauacgaggaugaagaagaaaaagaagaagaagaagaagaagaagaaguggaagaugaagcccuaugggcguggccuagugaacuaucaagcccagggccugaggccucacuaccaacagaacccgcugcucaagaagaaucacuaucacaagcaccagcacgagcaguucuacaaccaggugcaaguccauuaccugacggugaauccgaagcaucacgaccgccaagaguccauggaccaccuacugaaacauuaccuaccccuagagagagaaaccuagcauccccaucaccuucuacucucguagaagcacgagaaguaggagaagcgacaggaggaccagaacuaaguggaguaccaagaggagagucugaagaaacagggucgucugaaggagcaccaucacuucuuccagcaacaagagcacccgaaggaacaagggaauuagaggcaccaagugaagacaauucaggucggacagcuccugcaggaacgagcguucaagcacaaccgguacuaccaacagauuccgcauccagaggugguguagcaguagugccggcaaguggagauugugucccaagcccaugucacaauggagggacaugccuagaagaagaggaaggaguuagauguuuaugcuugccagguuacgggggagauuuaugugacguaggccuacgauucuguaaucccgguugggaugcauuucagggugcauguuacaaacauuucaguacaagaagaucaugggaagaagcggaaacacaaugcagaauguacggugcacacuuagcuaguaucucaacacccgaagaacaagacuuuauaaauaacagauauagggaauaccaauggauuggauuaaaugauagaacaauugaaggagauuuccuauggucagaugguguuccauugcucuaugaaaauuggaauccaggccaaccugacagcuauuucuuauccggggagaacugcguuguaaugguauggcacgaucaaggacaauggagcgauguuccauguaauuaucaucuuaguuacaccuguaagaugggucugguaucuugugguccgccaccugaacuaccauuagcacaaguuuuuggaagaccaagauuacguuacgaaguagauaccguguuacgauacagaugucgagagggucuagcgcaaagaaaccuaccacuuauacgcugccaagaaaacgggcguugggaagccccucaaauuucauguguaccaagaagaccagcaagagcauuacacccagaagaagacccugagggucgucagggaagacuauuaggaagauggaaagcacugcuaauaccaccuaguaguccaaugcccggaccuuaa

SEQ ID NO: 3925 - RNA, 3321 nt, Artificial Sequence
  AAA60049 variant
augagauuacccggcgcuaugcccgcacucgcacuaaaaggugaauuacuauuacuaucccuguuauuacuacuugaaccucaaauaagccaaggacuugugguuacaccaccugguccagaguuaguauuaaauguuuccagcacauucguauuaacaugcucaggaagcgcuccaguaguuugggaaagaaugucucaagaaccaccucaggaaauggcaaaagcgcaagacggcaccuuuucaucuguauuaacacugaccaauuuaacaggucuagacacaggugaguauuuuuguacacauaaugauucaagaggccuagaaacugacgaacgaaagcgcuuauauauauuuguaccagacccaacaguuggauuucugccaaaugaugcagaagaacuauuuauauucuuaacugaaauaacugaaauaacuauuccaugucgaguaacagauccucaauuaguaguuacacuucaugagaagaaaggagauguugcacuaccggucccauaugaucaucaacgaggauucucagguauauucgaagaccgaucauacauaugcaaaacuacaauaggcgauagagaaguagacagugaugcauauuauguauaucgacuacaaguuucaagcauaaacguaucagucaaugcaguccaaaccguaguaagacaaggagaaaauauaacacuaauguguauaguaauaggaaacgaaguaguaaauuuugaguggaccuacccacgaaaagaaucaggccgacucguagaaccugugacagauuuccuauuagacaugccauaccacauaagauccauucuucauauacccucagcugaacuugaagacucaggaacauauaccugcaacguuacagaaucgguuaaugaccaucaagacgaaaaagcuauaaacaucacaguggucgaaucaggauauguaagacuccuaggcgaaguagguacacuacaauucgccgaacuucauagaaguagaacacuacaaguuguuuuugaagcauacccgccacccacaguuuuaugguuuaaagacaauagaacauuaggcgauucuagugcgggagaaauugcauuaucuacacgaaauguaagugaaacaagauaugucucagaauuaacacucguaagaguaaaaguugcagaagcagggcacuacacaaugcgcgcauuccacgaagacgccgaaguucaacuuuccuuccaacuccaaauaaauguuccagucagaguccuagaauuaagcgaaagccacccagacucuggugaacaaacuguaagauguagaggcaggggcaugccacagccaaauauaauauggagcgcaugucgagaucucaaaagaugcccgcgcgaacuucccccaacacucuuaggaaauucuagugaagaagaaucacaauuagaaacaaaugucacguacugggaagaagaacaagaauuugaaguaguaagcacauuaagauuacaacauguagauagacccuuaaguguacguugcacuuuaagaaacgcagucggacaagacacccaagaaguaauuguaguaccacacucacuuccauucaaagugguaguaauauccgcaauccuagcucuagucguauuaacaauaauuagcuuaauaauauuaauaauguuauggcaaaagaaaccgagauaugaaauuagauggaaaguuauagaaaguguaucuagugauggucacgaauauauuuacguugacccuaugcaauuaccauaugauucuaccugggaauuaccacgagaccaacugguacucgguagaacccuaggaucuggagcguucggucaaguaguugaagcaacggcacauggacuaagucauucacaggcuacuaugaaaguggcugucaaaaugcuuaaaaguaccgcaagaucuuccgaaaaacaagcucuaaugucugaauuaaaaauuaugagccauuuggguccucaccuaaacguaguuaaccuauuaggagcauguacaaaaggaggaccgauauauauaauaaccgaauauuguagauauggugaucuaguagacuaccuacacagaaauaaacacacauuucuacaacaucauagugauaaacgaagaccaccaucugccgaacucuauucaaaugcuuuaccaguggggcuacccuuacccucccacguaucccuaacuggagaaucugauggagguuacauggacaugagcaaagacgaaagugucgacuauguaccuauguuagacaugaaaggugacguaaaauaugcugauauugaaaguucaaacuauauggccccauacgauaauuacguaccuagugcccccgagcguaccugucgagccacacuaauuaacgagaguccugucuuaagcuacauggaucuagucggcuuuuccuaucaaguagcuaacggaauggaauuucuagcaucuaaaaauuguguucaucgcgacuuagcagcccgaaacguacuaauuugcgaaggaaaauugguuaaaauuugugacuucggacuagcccgcgauauaaugcgagauucaaacuauaucaguaaaggcucaacauucuuaccuuuaaaguggauggcuccagaguccauuuucaacucacuauacacaacacuaagcgacguauggucauuugguauccuucuuugggaaauauucacucuaggagggacaccauacccagaacuaccgaugaacgaacaauucuacaaugcuauuaaaagaggauauagaauggcucaaccagcucaugcaucugaugaaauauaugaaauaaugcaaaagugcugggaggaaaaauucgaaauaagaccacccuucucacaauuaguauugcuucuagagagacuucucggagaaggauauaaaaagaaauaccaacaaguugacgaagaguuccuaagaagcgaucaucccgcaaucuuaagaagucaagcucguuuaccaggcuuccacggacuaagauccccauuagauacaucgucaguacuuuauacagccguacaaccaaacgaaggagauaacgacuauauuauaccuuuaccagauccuaaaccagaaguagcugaugagggaccacucgaagguaguccaagucuugcaucuucaacucuuaacgaaguaaauacgagcucaacaauuucaugcgauucaccauuagagccacaagacgaaccagaaccugagccucaauuagaacuacaaguagaaccagaaccagaacuagaacaauuacccgauagugguugcccggcucccagagcugaagcugaggacucguuucuauaa

SEQ ID NO: 3926 - RNA, 942 nt, Artificial Sequence
  EAX03935 variant
auguuauuauccaaaauaaauucacuugcacaucuaagagcagcaccauguaaugaucuacacgcuacaaaacuagcacccggaaaagaaaaagaaccauuggaaucucaauaucaaguaggaccccuauuaggaucuggaggauucggaucaguauauucaggcauaagagucucagacaaucuucccguagcaauaaaacauguagaaaaagacagaauaucagacuggggagaauuaccaaauggaacaagaguaccaauggaaguaguacuauuaaaaaaaguauccucagguuuuaguggaguaauaagauuauuagauugguuugaaagaccagauucauuuguauuaauacuagaaagaccagaaccaguacaagaucuuuuugacuuuauaacagaacgaggcgcauuacaagaagaauuagcaagaucauuuuuuuggcaaguacuagaagcggucagacacugucacaauugcgguguauuacacagagauauaaaagaugaaaauauacuaauagauuuaaauagaggagaacuaaaauuaaucgacuucggaucaggagcacuauuaaaagauacaguauacacagacuuugauggaacuagagucuauucaccaccagaauggauaagauaccauagauaucacggaagaucagccgcuguauggaguuuaggcauauuauuauaugauaugguauguggagacauaccauuugaacacgacgaagaaauaauaaggggccaaguauuuuuuagacaaagaguaucaucagaaugucaacauuuaauaagauggugcuuagcauuaagaccaagugacagacccacauucgaagaaauacaaaaucacccauggaugcaagacguauuguuaccacaagaaacagcagaaauacauuuacauuccuuauccccaggaccaucaaaauaa

SEQ ID NO: 3927 - RNA, 303 nt, Artificial Sequence
  AAB81333 variant
auggcagaugaagaaaaauuaccaccaggaugggaaaaaagaaugaguagaccaaguggaagaggauauuauuuuaaucauauaacaaauccaagucaaugggaaagaccaaguggaaauaguaguaguggaggaaaaauauggcaaggagaaccagcaagaguaagaagaagucauuuauuaguaaaaccaguaaaagcagcauuagauuuagcagcaggaaaucauccagaucaaggaggaggaccaggagcagaucaaagauuacauccagaagaucaagggagaagagaaggauuauaa

SEQ ID NO: 3928 - RNA, 492 nt, Artificial Sequence
  AAC50492 variant
auggcagaugaagaaaaauuaccaccgggaugggaaaaaagaaugagcagaagcucaggaagaguauauuacuuuaaccauauaacaaacgcaagccaaugggaaagaccaagcggaaacucaaguucaggaggaaaaaauggacaaggagaaccagcaagaguaagauguagccaucuacuaguaaaacacucacaaucaagaagaccaucaagcuggagacaagaaaaaauaacaagaacaaaagaagaagcacuagaacuaauaaacggauacauacaaaaaauaaaaagcggagaagaagacuuugaaagucuagcaagccaauucucagacuguagcagugcaaaagcaagaggagaucuaggagcauuuaguagaggacaaaugcaaaaaccauucgaagacgcaagcuuugcauuaagaacaggagaaaugaguggaccaguauuuacagauagcggaauacauauaauacuaagaacagaauaa

SEQ ID NO: 3929 - RNA, 138 nt, Artificial Sequence
  AAH31971 variant
augcaaaaaccauucgaagacgcaucauuugcauuaagaacaggagaaaugucaggaccaguauuuacagauucaggaauacauauaauacuaagaacagaaugcuggagacaaacaagaggaccaaacuguuucuaa

SEQ ID NO: 3930 - RNA, 639 nt, Artificial Sequence
  AAG22596 variant
augaaagucuucaaauucauaggacuaaugauauuacuaacauccgcauucucagcagguucaggacaaucaccaaugacaguacuaugcucaauagacugguucaugguaacaguacacccuuucaugcuaaacaaugacguaugcguacacuuccacgaacuacaccuaggacuaggaugcccaccaaaccacguacaaccacacgcauaccaauucacauacagaguaacagaaugcggcauaagagcaaaagcaguaucacaagacaugguaauauacucaacagaaauacacuacucaucaaaaggaacuccaucaaaauucguaauaccaguaucaugugcagcaccacaaaaaucaccauggcuaacaaaaccaugcucaaugagaguagcaucaaaaucaagagcaaccgcacaaaaagaugaaaaauguuacgaaguauucucacuaucacaauccucccaaagaccaaacugcgacugcccacccugcguauuuucagaagaagaacacacacaaguaccaugucaccaagcaggagcacaagaagcacaaccacuacaacccucacacuucuuagacauaucagaagacuggucacuacacacagacgacaugauaggaucaauguaa

SEQ ID NO: 3931 - RNA, 1986 nt, Artificial Sequence
  AAB00386 variant
auggaucuaguacuaaaaagauguuuauuacauuuagcaguaauaggcgcauuacuagcaguaggagcaacaaaaguaccacgaaaccaagauugguuaggcguaucacgacaacuacgcacaaaagcauggaaccgucaacuauauccagaauggacugaagcacaaagauuagauuguuggagagggggacagguuaguuuaaaaguuaguaaugacggaccaacacuaauuggagcaaacgcaaguuuuagcauagcauuaaauuucccaggaucacaaaagguacuacccgauggucaaguaauuuggguuaauaauaccauaauaaauggaucacaaguauggggaggacaaccaguauauccucaagaaacugacgaugcauguauauuucccgacggaggaccauguccaucugguaguuggucccaaaaacgaucauuuguauauguguggaaaacauggggacaauauuggcaaguauuaggagguccuguaucaggacuaaguauuggaacaggaagggcaauguuaggaacacauacaauggaagucacugucuaccauagacgcggaucgagaucauauguccccuuagcccauucaucuucagcauucacaauaacugaucaaguaccauucuccguaucuguaucacaauuaagagcauuagauggaggaaauaaacauuuucuacgaaaucaaccucuaacauuugcauuacaauuacaugauccgucaggauaccuugcagaagcagaucuuucauauacaugggacuuuggugauucguccggaacacugauuucaagagcucuaguuguaacccauacauaccuugaacccggcccagucacagcucagguaguauuacaagcagcuauaccauugacguccuguggcucaaguccaguaccuggaacaacagauggacauaggccuacugcagaagcaccaaacacgacagccggacaaguaccuacgacagaaguggucggaacaacaccuggucaagcaccuaccgcagaaccaaguggcacaacaucaguucaagucccaacaacggaaguaauaaguacggcaccaguacaaaugccaacagcagaaucuaccggcaugacaccagaaaaaguuccaguuucugaaguaaugggaacaacauuagccgaaaugucuacaccugaagcuacuggaaugacuccggcagaaguaucaauuguaguacuaucagguacaacugcagcgcaagucaccacuacagaauggguagaaacgacggcacgggaacuuccgauaccagaaccugaaggaccagaugcaucaucaauuaugaguacagaaucaauaacaggaucacuugguccacuucuagacggaaccgcuacccuaagauuaguaaaaaggcaaguaccacuugauugcgucuuauaucgauacggaucauuuaguguaacucuagauauaguacaaggaauagaaagugcugaaauacuacaagcaguaccuucaggagaaggugaugcuuuugaacuaacuguaucaugccaagguggacuuccaaaagaagcaugcauggaaauaucaaguccaggaugccaaccuccagcacaaagacuaugccaaccaguucucccuagcccugcaugucaauugguacuccaucaaauacuaaagggagguagcggaaccuauugccuaaacguaucucuagcagacacuaauagcuuagcaguaguuucaacucaacucauaaugccaggucaagaagcaggucuaggacaaguuccauuaauuguaggcauuuuauuaguucuaauggcuguugucuuagcuagucuaauauacagaagaagguuaaugaaacaagauuuuucuguaccacaacucccacauucgucaucacauugguuaagauugccaagaauauuuuguucaugccccaucggagaaaauucaccucuacuaucaggccaacaagucuaa

SEQ ID NO: 3932 - RNA, 2649 nt, Artificial Sequence
  CCDS10255.1 variant
auggaaccagcaccagcaagauccccacgaccacaacaagacccagcuagaccucaagaaccaacaaugccacccccugaaacaccuucagaaggaaggcaaccuaguccaucuccaagccccaccgaacgugcgcccgcaucggaagaagaauuucaauuuuuaagaugucaacaaugccaagcagaagcaaaaugccccaaauuacugccaugcuuacauacuuuauguucgggcugcuuagaagcaaguggaaugcaaugcccaaucugucaagccccauggccauuaggugcagacacccccgccuuagacaacguauucuuugaaucauuacaacgaaggcucucaguauaccgacaaauaguugaugcacaagcuguuugcacaagaugcaaagaaagugcagacuuuugguguuuugaaugcgaacaauuacuaugugcaaaaugcuucgaagcccaccaaugguuucuaaaacaugaagcacgaccauuagcagaacuaagaaaucaaagcguaagagaauuuuuagauggcacgaggaaaaccaauaauaucuuuugcucuaacccuaaucacagaacaccaacucucacaaguauuuacugcagaggcugcucaaaaccacuauguugcucaugcgcacuauuagauaguagucauucagaauugaaaugcgacauaagugcagaaauacaacaaagacaagaagaauuagaugcaaugacacaagcauuacaagaacaagauagugcuuuuggagcaguucacgcccaaaugcaugccgcuguaggacaauuagguagagcacgugcagaaacagaagaacuuauaagagaacgaguuagacaagucgucgcucacguucgugcacaagaacgcgaauuauuagaagcaguugaugcaagauaucaaagagacuaugaagagauggcaucccgacuuggaaggcucgaugcaguauuacaaagaauaagaacaggaucugcuuuaguacaacguaugaaaugcuaugcaucugaucaagaaguacuagauaugcauggauuucuaagacaagcacuuugccgacuucgucaagaagaaccacaaagccuacaagcggccguacgaacagaugguuuugaugaauuuaagguucgccuucaagacuugucuucaugcauaacgcaaggaaaagacgcugcuguuucuaagaaagccucaccagaagcagcaucaaccccuagagacccaauagauguugauuuacccgaagaagcagaaagaguuaaagcacaaguucaagcacuaggcuuagcagaagcacaaccaauggcaguaguucagucaguuccaggagcacaccccguuccuguauacgcauucucuauaaaagguccuucuuauggugaagauguaucuaauacaacgacagcacaaaaacgaaaauguucacaaacacaauguccccgaaaagucaucaaaauggaaagugaagaggguaaagaagcuagacuagcacgaucaaguccagaacaaccccgaccaucuacaucaaaagcuguaucuccaccacaucuugauggaccuccauccccuaggucaccuguuaucgguucagaagucuucuuaccaaacagcaaccauguagcaucaggugcaggagaagcggaagaaagaguuguuguuauaucaucaucagaagacucugaugcugaaaacucauccucccgcgaacuugaugauucuaguucagaaucaucagauuuacaauuggaaggaccaucuaccuuaaggguucuugaugaaaaucuagcagauccacaagcggaagaucgacccuuaguauucuuugaucuaaaaauagacaaugaaacacagaaaauaagucaauuagcagcaguaaaccgugaaucaaaauuucgaguaguaauacaaccagaagcauucuuuuccauuuauaguaaagcaguuucacuagaaguaggccuacaacacuuuuuaucauuuuuauccucuaugcgacgcccaauucuagcgugcuauaaacuuuggggaccuggacuaccaaacuuuuuccgugcuuuagaagauauaaaucgacuaugggaguuccaagaagccaucucgggauuucuagcagcacuaccucuaauaagagaaaggguaccaggagccagcucauuuaaacuuaaaaacuuagcacaaacuuauuuagcaaggaauaugagugaaagaagcgccauggcggcuguacuagccaugagagaucucugcagacuucuagaagucucacccggcccacaacuugcacaacauguauaucccuucucgaguuuacaauguuuugcuucacuccaaccauuaguacaagcagcuguacuuccacgugcagaagcacgacuauuagccuuacauaauguuucauuuauggaauuacugagcgcacaccgaagagaucgacaaggaggucuaaagaaauacagcagauacuuaucgcuacaaacuaccacacuuccaccagcacaaccggcuuucaaccuccaagcucuagguacauacuuugaagguuuacuugaaggcccugcuuuagcaagggccgaaggugugagcacaccuuuagcaggacgaggauuagcagaaagagcaucacaacaauccuaa

SEQ ID NO: 3933 - RNA, 3228 nt, Artificial Sequence
  CCDS46409.1 variant
augguaguagaaguagauucuaugccagcggcauccucgguaaagaaaccauuuggauuaaggagcaaaauggguaaaugguguuguagauguuuuccauguuguagagaaucuggaaaaucaaaugucggcacuucaggagaccaugacgauagugcuaugaaaaccuuacgcucaaaaaugggaaaauggugcagacauuguuucccaugcuguagaggaagugguaaaucaaacguaggagcuucaggcgaccacgaugauagugcaaugaaaacacuaagaaacaaaauggguaaaugguguugccacuguuuuccaugcugcagaggaagcucgaaaaguaaagucggcgccuggggagauuacgaugacucugcauucauggaaccaagguaucaugugcgaggagaagacuuggauaaacuacacagagccgccuggugggggaaaguuccucggaaagauuuaaucgucauguuaagagacacagauguaaacaaacaagauaaacagaaaagaaccgcauuacauuuagcaucagcaaacggaaauagcgaaguaguaaaacuguuauuagacagacgaugccaauuaaacgugcuagauaacaagaaaagaacggcccuaauaaaagcaguucagugccaagaagaugaaugugcauuaauguuauuagaacaugguacagacccaaauauaccagacgaauacggcaacacaacacuacauuacgcuauauauaacgaagauaaauuaauggcaaaagcauuguuacucuauggagcagauauagaaagcaaaaauaaacauggacuaacaccacugcuacuugguguccaugaacagaaacaacaagugguaaaauuucuaauaaagaagaaagcaaaucucaaugcccucgaucguuauggaagaacugcacuaauacuagcaguauguugcgggucagcaaguaucguaaguuuauuacucgaacaaaacauagacguuucaucgcaagaccuuucaggucaaacagcucgagaauaugccguaagcucucaucaucauguaauaugucaauuauuaucagacuacaaagaaaaacaaaugcugaaaauaucgucagaaaauucaaauccagaacaagaucucaaacuaacaucggaagaagaaagucaacguuucaaaggcucagaaaauagucaaccagagaaaaugucucaagaaccagaaauaaacaaagacggcgauagagagguagaagaagagaugaagaaacaugaaucaaacaacguaggacuccuagaaaauuuaacgaacggagucacugcgggaaacggcgauaauggacuuauaccacagcguaaaagccgcacaccagaaaaucaacaauucccagacaacgaaagugaagaauaucaucgaauaugcgaacuauugucugauuacaaagaaaaacaaaugcccaaauauucaucggaaaauagcaaccccgaacaggaucuuaaacucacgagugaagaagaaagucaaagauuaaaaggaucagagaauggccagcccgagaaaagaucucaagaaccagaaauaaauaaagauggugacagagaacuagaaaauuucauggcaaucgaagaaaugaagaaacaccgcagcacucacguaggauuuccagaaaaucucacgaauggagcaacugcagggaauggagacgacggguuaauaccgccaagaaaaucaagaacuccagaaagccagcaauuuccagauaccgaaaaugaagaauaccauagcgacgaacaaaacgauacacaaaaacaauuuugcgaagaacaaaauacaggaauauuacaugacgaaauauuaauacaugaagaaaaacagauagagguaguugagaaaaugaacucugaacuuucacucucaugcaagaaagaaaaagauauacuacaugaaaacucaacacuaagagaggaaauugcaaugcugcgacuggaauuagacacaaugaaacaucaaucucaacuacgagaaaagaaauaucuggaagauauagaaucaguuaagaaaagaaaugauaauuuacugaaagcgcuccaauuaaaugaauuaaccauggacgacgauacugcuguucuaguaauugauaauggaucuggaaugugcaaagcuggauucgcuggagacgacgcaccucgcgcaguauuuccaucuauaguaggcagaccaagacaacaaggcaugaugggugguaugcaucaaaaagaaucuuacguagguaaagaggcgcaaucaaaaagaggaauacuuacccuaaaauacccaauggaacacggaauaauaacaaauugggaugauauggagaaaauauggcaucacacauuuuacaaugaacugcggguggcgccagaagaacacccaguauuacuuaccgaagcuacguuaaaccccaaagcgaaucgagagaaaaugacacagaucauguuugaaaccuuuaauacaccagccauguacguagcuauacaagcaguacugucacuauacacaaguggaagaacuacaggaauaguaauggauuccggagaugguguaacucauacaguccccauauacgaaggcaacgccuuaccucacgcaacacucagacuggacuuagcagguagagaauuaccagacuacuuaaugaaaauuuuaacagaacacggauacagauuuacuacaauggcggaaagagaaaucgugagagauauaaaagaaaaacuauguuauguugcauuagauuuugaacaagaaauggcaacuguagcuuccaguaguucgcuagagaaaaguuaugaacucccagauggacaaguaauaacgauaggcaacgaaagauucagauguccagaagccuuauuccaacccugcuuuuuaggaauggaaagcugcggcauucaugaaaccacauuuaauagcauaaugaaaucagacguugacaucaggaaagauuuauacacaaauacaguacuaagcggaggaacaacuauguaccccggaauggcacauagaaugcaaaaagaaauagcugcauuagcaccaaguaugaugaaaauaagaauaauagccccgccuaaaagaaaauauucaguaugggucggcggaaguauacuagccucacuuaguacauuucaacaaauguggauaaguaagcaagaauaugacgaaucaggaccaaguauaguacaucgcaaauguuuauaa

SEQ ID NO: 3934 - RNA, 1755 nt, Artificial Sequence
  CCDS13562.1 variant
auggucgcagaaguaugcuccaugccaacugcaucaacaguuaaaaaaccguucgacuuaagaucaaaaaugggaaaauggugccaccacagguucccuugcugcagaggcucaggaaaaucaaacaugggaacaagcggcgaccacgacgacucauucaugaaaaugcuaagaucaaaaaugggaaaaugcuguagacacuguuuuccguguugcagaggcucuggaacaucaaaugucggaacaagcggagaccaugaaaacagcuuuaugaaaauguuaaggaguaagauggguaaauggugcugucacugcuucccguguugcagagguaguggaaaaucaaaugucggcgcauggggagacuacgaccacagugcuuucauggaaccgagauaccauauaaggagagaagaccuagacaaauuacacagagccgcaugguggggaaaaguaccaagaaaagaucuuauagucaugcuaagagauacagacaugaacaaaagggauaaagaaaaaagaacagcacuccacuuagccucagcaaacggaaacucagaaguaguacaauuguuauuagaccgaagaugccaacuaaauguauuagauaacaaaaaaagaacagcacuaauaaaagcgauccaaugccaggaagacgaaugcguacuaaugcuacuugaacacggagcagauagaaacauaccagacgaauaugguaacacagcacuacacuacgcaaucuacaacgaagacaaauuaauggcaaaagcacuacuacuauacggagcagacauagaaaguaaaaacaaaugcggacuaacaccucuacuacugggaguacaugagcagaaacagcaaguaguaaaauuccucauaaaaaaaaaagcuaacuuaaauguauuagacagauauggaagaaccgcuuuaauacucgcaguauguugcggaagcgcaagcauagucaaucuacuuuuagaacaaaacguugauguaucaagccaagaucuaucaggacaaacagcacgagaauacgcugucucaagccaccaccauguaauaugugaauuacuaucagauuacaaagaaaaacaaauguuaaaaauaucaagcgaaaacaguaauccagaacaagaccuaaaauuaacaagcgaagaagaaucacaaagacuaaaaguaucugaaaacagucaaccagagaaaaugagccaagaaccagaaauaaauaaggauugugacagagaagucgaagaagaaauaaaaaaacacggaucaaacccaguaggccucccagaaaauuuaacaaauggagcaagugcaggaaacggcgaugacggauuaauaccacaaagaaggucaagaaaaccagaaaaccaacaauucccugacaccgaaaacgaagaauaucacagugaugaacaaaaugacacacgaaagcaacuaucagaagaacaaaacaccggaauaucacaagacgaaauucuaaccaauaaacaaaaacaaauagaaguagccgaacaaaaaaugaauagcgaguuaagucuaagucauaaaaaagaagaagaccuauuaagagaaaacucaguauuacaagaagaaauagcaauguuaagacuagagcucgacgaaacaaaacaucaaaaccaacuaagagaaaacaaaauauuagaagaaauagaaucuguaaaagaaaaaacagacaaacuauuaagggcaaugcaacucaacgaagaagcauuaacaaaaacaaauauauag

SEQ ID NO: 3935 - RNA, 1530 nt, Artificial Sequence
  EAW59519 variant
auggaacgaagaagacuaugggguucaauucaaucuagauacaucagcaugucaguauggacuucuccaagaagauuaguagaacucgcaggucaauccuuacucaaggacgaagcacucgcaaucgcagcccuagaauuacuaccacgagaacuauucccaccccuauucauggcagcuuuugauggacgacauucccaaacauuaaaagcaaugguccaagcauggcccuucaccuguuuaccucucggagucuuaaugaaaggacaacacuuacauuuagaaacauuuaaggccguuuuagacgguuuagacguacuacuugcucaagaaguacgaccaagacgauggaaacuccaaguacuagauuuacgaaaaaacucucaccaagauuucuggacuguauggucaggaaaccgugcaucacuuuauucauucccagaaccugaagcugcccaacccaugaccaaaaaaagaaaaguagacggacuauccaccgaagcagaacaaccauuuauaccaguugaaguauuaguagauuuauuucucaaagaaggagcuugugaugaacuuuuuaguuaucucauagaaaaaguaaaacgaaaaaaaaacguccuacgacucuguugcaaaaaacuuaaaauauuugcaaugccaaugcaagacauaaaaaugauccuaaaaaugguucaauuagacuccauagaagaccuugaagucacauguacauggaaauuaccaacauuagcaaaauucucaccauacuuaggacaaaugauaaauuuaagacgacuacuccuuucucauauacacgcauccucauacauaagcccagaaaaagaagaacaauacauagcucaauuuacaucucaauuccuaucucuacaaugcuuacaagcuuuauauguagacucauuauuuuuccuaagagguagauuagaucaauuacuaagacacguaaugaacccauuagaaacacuaucaauaacaaauuguagauuaucagaaggagacguaaugcaucuaucacaaucaccaucuguaucucaacucucaguccucagcuuaagcggaguaaugcuaaccgacgucucuccugaaccacuacaagcauuacuagaaagagccucagcaaccuuacaagauuuaguauucgaugaaugcgguauaacagacgaccaauuacuagcauuacuaccaucacuaucacacuguucucaacucacaacuuuaucauucuacggaaacucaauauccaucucagcacuacaaucacuacuacaacauuuaauaggauuaucuaauuuaacacauguacucuacccaguaccacuugaaucuuacgaagacauacaugguaccuuacauuuagaaagauuagcauacuuacacgcccgacucagagaacuacugugugaauuaggaagaccaucuaugguauggcuaucagccaacccuugcccacacuguggagauagaacauuuuacgacccugaacccauauuaugccccugcuucaugccaaauuaa

SEQ ID NO: 3936 - RNA, 1530 nt, Artificial Sequence
  AAC51160 variant
auggaaagacgcagacuauggggaucaauacaaucaagauacauauccaugucuguauggaccucaccaagaagauuaguagaacuagccggacaauccuuauuaaaagaugaagccuuagcaaucgcagcacuagaacuacucccuagagaacuauuuccaccacuuuucauggcagcauucgacgguagacauucccaaacccuaaaagcaaugguacaagcauggccauuuaccugcuuaccauuaggaguacuaaugaaaggccaacaccuccaucuagaaacauucaaagcaguacuagacggauuagacguacuacucgcacaagaagucagaccaagacgauggaaauuacaaguccucgaccuacgaaaaaacucccaucaagauuucuggacagucuggucagguaaucgugcaaguuuauauucauucccagaaccagaagccgcacaaccaaugaccaaaaaaagaaaaguagacgguuuaucuacagaagccgaacaaccauucaucccaguagaaguucuaguagaucuauucuuaaaagaaggagcaugcgacgaauuauuuucauauuuaauagaaaaaguaaaaagaaaaaaaaacguacuaagacuuuguuguaaaaaauuaaaaauauucgccaugccaaugcaagacauaaaaaugauccuaaaaaugguucagcuagacucaauugaagaccuagaaguaacaugcacauggaaacuaccaacauuagcaaaauucucaccuuaccuuggucaaaugauaaaccuaagaagacuucuauuaucacauauacacgccucuucuuacauuucacccgaaaaagaagaacaauacauagcccaauuuacaucacaauuccuuucauuacaaugcuuacaagcucuauacgucgauucccuauuuuuucuaagagguagacuagaucaacuuuuacgccacgucaugaacccuuuagaaacauuaucaaucacaaauugcagacuaucugaaggugacguaaugcacuuaucacaaucaccaucuguaucucaauuaucaguccuaucucuauccggaguuauguuaacagauguaucaccagaaccucuccaagcccuacuagaacgagcaucagccacacuacaagaucucguauucgacgaauguggaauaacugacgaccaauuacuagcuuuauuacccucccucucccacugcucucaacucacaacacucuccuucuacgguaauucaauaucaaucucugcacuacaaucucuuuuacaacaccuaaucggucuaagcaaucucacccacguauuauacccaguuccucuagaaucuuacgaagauauacacggaacccuacaucuugaaagauuagcauaccuacacgcaagacuacgcgaauuacuaugcgaacuuggacgaccaucaauggucuggcuaucagcaaauccaugcccacacugcggagaccguacauucuacgauccagaaccaauauuaugcccauguuucaugccaaacuaa

SEQ ID NO: 3937 - RNA, 645 nt, Artificial Sequence
  CCDS8069.1 variant
augggauuagcaggaguaugugcauugagaagaagugcaggguauauacuaguaggaggagcaggaggacaaagcgcugcggcagcagcgaggagauacagugaaggagaaugggcaaguggaggaguaagaaguuuuaguagagcagcugcagcaauggcgccaauaaaaguaggagaugcaauaccagcaguagaaguauuugaaggagaaccaggaaauaaaguaaauuuagcagaguuauuuaaagggaaaaaaggaguacuauuuggaguaccaggagcauuuacaccaggauguaguaaaacacauuuaccaggauuuguagaacaagcagaagcauuaaaagcaaaaggaguacaaguaguagcauguuuaaguguaaaugaugcauuuguaacaggagaauggggaagagcacauaaagcagaaggaaaaguaagacuauuagcagacccaacaggagcauuuggaaaagaaacagauuuauuauuagaugauaguuuaguaaguauauuuggaaauagaagauuaaaaagauuuaguaugguaguacaagauggaauaguaaaagcacugaauguggaaccagaugggacaggauuaacauguaguuuagcaccaaauauaauaagucaauuauaa

SEQ ID NO: 3938 - RNA, 309 nt, Artificial Sequence
  AAA63250 variant
augguaagauauagaguaagaagucuaagugaaagaagccaugaaguauacagacaacaacuacauggacaagaacaaggacaucacggacaagaagaacaaggacuaagcccagaacauguagaaguauaugaaagaacacauggacaaagccauuacagaagaagacacuguagcagaagaagacuacauagaauacacagaaggcaacacagaagcugcagaagaagaaaaagaagaagcuguagacauagaagaagacauagaagaggauguagaacaagaaaaagaacaugcagaagacauuaa

SEQ ID NO: 3939 - RNA, 1662 nt, Artificial Sequence
  AAH50416 variant
augguacaaagacuuuggguaucaagauuacuacgacauagaaaggcucaauuauuauuaguuaaucuauuaacauuugguuuagaaguauguuuagcagccggaauaacuuauguuccaccacuauuguuagaaguagggguagaagaaaaauuuaugacaauggucuuagguauaggaccaguuuuaggcuuaguuuguguuccacuauuagguagcgcaucagaucauuggagaggccgcuacggaagacguagaccauuuauuugggcacuaucuuugggaauacuucuuucacuauuuuuaauaccaagagccggaugguuagccggacuuuuaugccccgacccaagaccccuugaacuagcauuacuaauucuaggaguaggauuauuagauuuuuguggacaaguauguuuuacuccacuugaagcauuauuaucagaucuuuuuagagauccagaccacuguagacaagcauauagugucuacgccuuuaugauaucauuaggaggaugucuaggauauuuauuaccagcuauagauugggauacaagugcuuuagcaccauaucuagguacucaagaagaauguuuauuuggauuacuaacauuaauauuuuuaacaugcguugcagccacauuauuaguagcugaagaagcagcucuuggcccuacagaaccagcugaaggauuaucagcaccaucccucucaccacauuguugcccauguagagcuaggcuugcuuuuagaaauuuaggagcacucuuaccaagacuacaucaacuuugcuguagaaugccaagaacacuacgacguuuauucguugccgaacuuuguuccuggauggcucuaaugacauuuacacuauucuauacagauuuuguaggugaaggcuuauaucaagguguaccaagagcagaaccuggaacagaagcaagaagacauuacgaugaaggaguaagaauggguucuuuaggacuauuccuacaaugugcuauaucauuaguauuuucucugguaauggauagguuaguucaaagauuugguacacgagcugucuaucucgccucaguagccgcuuuuccaguugcagcuggugccacaugcuuaucacauucaguugcaguaguuacagcauccgcagcacuuacuggauuuacauuuucugcucuacaaauauugccauauacauuagcaucuuuauaucaucgagaaaaacaaguauuuuuaccuaaauaucgaggagacacugguggugcaucaucugaagauagucuuaugacauccuuucuaccuggaccaaaaccaggugcaccauuuccuaauggacacguaggagcuggugguaguggacuccuaccuccaccuccagcacuauguggagcaucagcaugcgacgucucuguaagagucguaguuggugaaccaacagaagcaagaguuguaccaggucguggaauuugccuagaucucgcaauauuagacucagcauuuuuacuaucacaaguagcaccuucuuuauuuauggggagcaucguacaauuaucucaaucaguaacagcauauaugguuuccgcagccggucuuggacucguagcaauauauuucgcaacgcaaguuguuuuugauaaauccgauuuagcuaaauauucagcguaa

SEQ ID NO: 3940 - RNA, 648 nt, Artificial Sequence
  CBI83574 variant
auggcaagucuacaaaugagaggaaacccaggaucacacuuuugcggaggcacauuaauacauccaucauucguauuaacagcagcacauugcuuaagagauauaccacaaagauuaguaaacguaguacuaggagcacacaacguaagaacacaagaaccaacacaacaacacuucucaguagcacaaguauuccuaaacaacuaugaugcagaaaacaaacuaaacgacauccuacuaauacaacuaucaucaccagcaaacuuaucagcaucaguagccacaguacaauuaccacaacaagaucaaccaguaccacacggaacacaaugccuagcaaugggauggggaagaguaggagcacacgauccaccagcacaaguauuacaagaauuaaacguaacaguaguaacauucuuuugcagaccccacaacauaugcacauucguaccacgaagaaaagcaggaauaugcuucggagacucaggaggaccacuaauaugcgacggaauaauacaaggaauagacucauucguaauauggggaugugcaacaagacuauucccagacuucuuuacaagaguagcacuauacguagauuggauaagaucaacacuaagaagaguagaagcaaaaggaagaccauaa

SEQ ID NO: 3941 - RNA, 771 nt, Artificial Sequence
  AAH96183 variant
auggcacauagaccaccaucaccagcacuagcaucaguauuacuagcacuacucuuaucaggagcagcaagagcagccgaaauaguaggaggacaugaagcccaaccccauucacgaccauauauggcaucauuacaaaugagaggaaacccagguucucauuuuugcggaggaacacuuauacauccaucauuugucuuaacagcagcacauuguuuaagagauauuccucaaagauuaguaaauguaguccuaggagcacauaauguaagaacacaagaaccaacacaacaacauuuuucaguagcacaaguauuucuaaauaauuaugacgcagaaaacaaauuaaaugacguacuucuaauacaacuaucuucaccagcaaauuuaucugcaucaguagcaacaguucaauuaccacaacaagaucaaccaguaccacauggaacacaaugucuagcaaugggauggggaagaguuggagcacaugacccaccagcacaagucuuacaagaacuaaacguaacaguaguaacauucuuuugcagaccacauaauauaugcacuuuuguaccaagacgaaaagcaggcauuugcuuuggagacucaggaggaccauuaauaugugacggaauaauacaaggaauagacucauuuguaauaugggguugcgcaacaagacuauuuccagauuucuuuacaagaguagcauuauauguugauuggauaagaaguacacuaagaagaguagaagcaaaaggcagaccauaa

SEQ ID NO: 3942 - RNA, 2760 nt, Artificial Sequence
  CCDS45721.1 variant
auguggcuagcagcagcggccccaaguuuggcuagaagacuauuguuucucgguccaccaccuccacccuugcuucuauuaguauuuucacguagcucaagaagaagacuacauucauuaggcuuggccgcgaugccugaaaaacgacccuucgaaagacuuccagcagauguaucaccaauaaauuacucuuugugucuaaaaccggauuuauuagacuucaccuuugaaggcaaacuagaagcagcagcacaaguuagacaagcuacuaaucagauuguuaugaauugcgcagacaucgauaucauaacugcaucauaugcucccgaaggugacgaagaaauccaugcuacuggcuuuaacuaucaaaacgaagaugaaaaaguuacacuuagcuuuccuucaacauugcaaacuggaacaggaacauuaaaaauugauuucguuggggagcuaaaugauaaaaugaaagguuucuaucgaaguaaauacacaacuccaaguggggaaguaagauaugcagcuguuacgcaauuugaagcaacagaugcccguagagcauuucccuguugggaugaaccagcaauaaaagcaacauuugauauaagccuaguuguuccuaaagacaggguugcacuuucaaauaugaacgugauagacagaaaacccuauccagaugacgaaaacuuagucgaaguuaaauuugcaagaacaccuguaaugucaacauaucuaguagcauucguaguuggagaauaugauuucguagaaacaagaagcaaagauggagucugcguuagagucuauacaccaguuggaaaagcagaacaaggaaaauucgcucucgaaguagcagccaaaacccuaccauuuuacaaagauuacuuuaacguaccauauccucuaccuaaaauagaucuuauagccauagcugauuuugcugcaggcgcuauggaaaauuggggcuuaguaacauauagagagacagcuuuauuaauugaucccaaaaauucuugcagcucaucuaggcaaugggucgcucuaguagucggucacgaacuagcccaucaaugguucgguaaucucguaacuauggaaugguggacacauuuguggcucaaugaagguuuugcaucuuggauugaauauuuaugcguggaccauugcuuuccagaauacgacauuuggacccaauucguuagcgccgauuauacaagagcacaagaauuagaugcacuagauaacucacacccaauagaaguaagugucggacacccuucugaaguggacgaaauauucgaugcaaucaguuacaguaaaggagcuucaguaauaagaauguuacaugauuauauaggagacaaagauuuuaagaaaggaaugaacauguaucuuacaaaauuucaacagaaaaacgcugcaacugaagaucuaugggaaucucuugaaaaugcaucaggaaaaccaauagcugcaguaaugaauacuuggacaaaacaaaugggcuuuccuuuaauauauguagaagcagaacaaguagaagaugacagacuccuaagauuaucccaaaagaaauuuugcgccggcggcucuuauguaggagaagauuguccacaguggaugguaccuauaaccauaaguaccagugaagacccuaaucaagcaaaauuaaaaauacuaauggauaaaccagaaaugaaugugguacuuaaaaacguuaaaccagaucagugggugaaguuaaaccuaggaacaguaggauuuuauaggacucaauacucuucagcuaugcuagaaucauuacuuccggguauuagagaucugucucuuccuccggucgaccgacuugguuuacaaaacgaucucuucagccuagcccgagcuggaaucauaucuacaguugaaguccuuaaaguuauggaagcauuuguaaaugaaccaaauuauacaguuuggucagaucuaagcugcaacuuaggcauauuaagcacauuauuaucucacaccgauuuuuaugaagaaauacaagaguucguuaaagauguauuuucaccuauaggagaaagacuaggaugggauccaaaaccaggagaaggccaucuagaugcauuacuuagaggauuaguauuaggcaaacuagguaaagccggacacaaagcaacacucgaagaagcaagacgucgcuuuaaagaccauguagaaggaaaacaaaucuuauccgcagaucuccgaagccccguuuaccuaaccgucuuaaaacauggcgauggaacaacucuagauauaaugcucaaauugcacaaacaagcagauaugcaagaagagaaaaacagaauagaaagaguguuaggagcuacgcucuuaccagaucucauacaaaaaguucuaacauuugcacuaucugaagaaguucgaccacaagauacaguaucaguaauaggagguguagcuggaggcucaaaacauggcagaaaagccgcauggaaauuuauaaaagauaauugggaagaacuuuauaauagauaccaaggaggauuucuaauuucaagauuaauaaaguuaucaguagagggauucgcagucgacaaaauggcaggcgaggucaaagcauucuucgaaagucacccggccccaagugcugaaagaacuauacaacaaugcugugaaaauaucuuacuaaacgcugccugguuaaaacgagaugcggaaucaauacaucaauaucuccuacaaaggaaagcaucaccaccaacaguuuaa

SEQ ID NO: 3943 - RNA, 660 nt, Artificial Sequence
  AAH65513 variant
auguuaagagcaggagcaccaacaggagauuuaccgcgagcaggagaaguacacacaggaacaacgauaauggcaguggaauuugauggaggaguaguaaugggaucagauucaagaguaagugcaggagaagcaguaguuaauagaguauuugauaaauuaagcccauuacaugaaagaauuuauugugcacuaucaggaucagcagcagaugcacaagcaguagcagauauggcugcauaucaauuagaauuacauggaauagaauuagaagaaccaccgcuaguauuagcagcagcaaauguaguaaggaauauaagcuauaaauacagagaagauuuaagugcacaucuaaugguagcuggaugggaucaaagagaaggaggacaaguauauggaacacuaggaggaauguuaacaagacaaccauuugcaauaggaggaaguggaaguacguuuauauauggauauguagaugcagcauauaaaccaggaaugaguccagaagaauguagaagauuuacaacagacgcgauagcauuagcaaugucaagagauggaucaaguggaggaguaauauauuuagugacaauaacagcagcaggaguagaucauagaguaauauuaggaaaugaauuaccaaaauuuuaugaugaauaa

SEQ ID NO: 3944 - RNA, 345 nt, Artificial Sequence
  EAW82312 variant
auggcaggacuagcacuacaaccaggaacagcacuauuaugcuauagcuguaaagcacaaguaucaaaugaagauugcuuacaaguagaaaauugcacacaauuaggagaacaauguuggacagcaagaauaagagcaguaggauuauuaacaguaauaucaaaaggauguagcuuaaacuguguagaugacucacaagauuacuauguaggaaaaaaaaacauaacauguugcgauacagauuuauguaacgcaucaggagcacaugcauuacaaccagcagcagcaauacuagcacuauuaccagcacuaggacuauuacuauggggaccaggacaacuauaa

SEQ ID NO: 3945 - RNA, 372 nt, Artificial Sequence
  AAC39607 variant
augaaagcaguauuauuagcacuacuaauggcaggacuagcauuacaaccaggaacagcacuacuaugcuacucauguaaagcacaaguaucaaacgaagacugccuacaaguagaaaacugcacacaacuaggagaacaaugcuggacagcaagaauaagagcaguaggacuacuaacaguaauaucaaaaggaugcucacuaaacugcguagacgacucacaagacuacuacguaggaaaaaaaaacauaacaugcugugacacagaccuauguaacgcaucaggagcacacgcacuacaaccagcagcagcaauacuagcacuauuaccagcacuaggacuacuacuauggggaccaggacaauuauaa

SEQ ID NO: 3946 - RNA, 963 nt, Artificial Sequence
  AAG40776 variant
augucauccugcaauuucacacacgcaacauucguauuaauaggcauaccaggauuagaaaaagcacauuucuggguaggauucccauuauuaucaauguacguagucgcaauguuugguaauugcauuguaguauucauuguucgaacagaacgaucacuacaugcaccaauguaccucuuccuauguauguuagcugcaauagaucuagcauuaucaacaucuacaaugccaaaaauacuagcauuauucugguucgauucacgcgaaauuucauuugaagccuguuuaacccaaauguucuucauacacgcacuaucugccauugaaucaacaauauuauuagcaauggcauucgaccgcuacguagcuauuugucauccauuacgacacgcagcaguauuaaauaauacaguuacagcacaaauuggaauaguagcaguaguaagaggauccuuauucuucuuccccuuaccacuccuaauaaaaagauuagcauuuugccauucaaauguauuaucacauucauauugcguacaucaagacguuaugaaacuugcauacgcugacacacuaccaaacguagucuauggacuaacagcaauauuacucguaaugggaguagauguaauguuuauaucauuaucauacuucuuaauaauucgaacuguauuacaacuaccaucaaaaucagaacgcgcaaaagcauucggaacaugcguaucccauauaggagucguauuagcauucuauguaccacuaauaggacuaucaguaguacaucgcuucggaaauucauuacacccaaucguaagaguaguaaugggagauauauaucuauuacuaccaccaguaauaaauccaauaauuuacggagcaaaaacuaaacaaauaagaaccagaguacuagcaauguucaaaauaucuugcgauaaagaccuucaagcaguaggaggaaaauaa

SEQ ID NO: 3947 - RNA, 2253 nt, Artificial Sequence
  AAA60209 variant
auguggaaccuccuucaugaaacagacagcgcaguagcaacugcaagaagaccuagauggcuaugcgcaggagcccucguacuagcaggaggcuucuuuuuauuaggauuucuuuuuggaugguuuauaaaaucgagcaaugaagcuacaaacauaacaccaaaacauaauaugaaagcauuucucgaugaacuaaaagcugaaaauaucaagaaauuccuuuauaacuuuacccaaauaccgcacuuagcagguacagaacaaaacuuccaauuagcuaaacaaauacaaucccaauggaaagaguucggccuagauucugucgaacuagcucacuacgacguauuacuaagcuaucccaacaaaacacacccuaauuauauaucaauaauaaacgaagacggcaacgaaauauucaacacuuccuuauucgaaccacccccaccuggauacgaaaacguaucugacauaguuccaccguuuuccgcauuuucuccacaaggaaugccagaaggagaucuaguauacguaaauuaugcaagaacagaagacuucuuuaaacuagaaagagauaugaaaaucaacuguucaggaaaaauaguaauugcaagauauggaaaaguauuuagaggcaauaaaguuaaaaacgcacaauuagcaggagcaaaagguguaauauuauacucagacccagccgauuauuuugcaccaggaguaaaaucauacccagauggcuggaauuuaccuggaggcggaguacaacgaggcaauauacuuaacuuaaauggugcaggagauccacuaacaccaggcuauccagcuaaugaauacgccuauagaagaggcauugcagaagccgucggauuaccaucaauaccaguacauccaauaggauauuaugaugcacaaaaacugcuugaaaagaugggcgguucugcuccaccggacucuagcuggcgaggcagcuugaaaguaccauacaauguaggaccaggauuuaccggaaauuuuucaacacaaaaaguaaaaaugcacauucauucuacaaacgaagucacaagaauauauaauguuauaggaaccuuaaggggagccguugaaccagaccguuauguaauuuuaggcggacauagagauagcuggguauucggaggaauagauccacaaaguggugcagcuguagugcaugaaauaguaagaucauuugggacacuaaagaaagaaggauggcgaccaagaagaacaauacuguuugcuaguugggacgcagaagaauuuggauuacuagguucaacugaaugggccgaagaaaauaguagacuacuacaagaaagaggcguagccuacauaaaugccgacucauccauugaagguaacuacacguuacgaguugauugcacaccauuaauguauagcuuaguacauaauuuaacaaaagaauuaaaaucaccagacgaaggauucgaaggcaaaaguuuauacgaaagcuggacaaagaaaucuccaaguccagaauuuucaggcaugccaagaauaucgaaacuuggcucaggaaaugacuuugaaguauucuuccaacgacuaggaauagcaucaggcagagcaagauauacuaaaaacugggaaacaaacaaauucucuggauauccauuauaucacucaguguaugaaacauaugaauuagucgaaaaauucuacgaucccauguuuaaauaucaucuaacaguagcacaaguuagaggaggcaugguauucgaacuagcaaauucaauaguacucccauuugauuguagagauuaugccguaguucuaagaaaauacgcagacaaaauauacucuauaucaaugaaacauccgcaagaaaugaaaacuuacucaguuucuuuugacagcuuauuuucagccguuaaaaauuuuacugaaaucgcgaguaaauuuucggaaagacuacaagauuuugauaaaucaaauccaaucguauuaagaaugaugaacgaccaauuaauguucuuagaacgagcauucauagauccauuaggacuaccagaucguccauuuuacagacauguaauuuaugcaccaaguucacacaauaaauacgcaggcgaaucauuccccgguauauaugaugcuuuauuugacauagaaucuaaaguagacccaagcaaagcauggggagaaguuaaacgacaaauauacguagcugcauuuacaguacaagcagcagcagaaacacucagugaaguugccuga

SEQ ID NO: 3948 - RNA, 3921 nt, Artificial Sequence
  CCDS1397.2 variant
augacaauguauuuguggcuaaaacuacucgcauuuggcuuugcuuuucuagacaccgagguuuucguaacaggacaaagcccuacuccaucgccaaccgguuuaacuaccgcaaaaaugccaucugucccccuaucuuccgaucccuuaccgacacauaccacagcauucagcccugccucuacauucgaaagggaaaacgauuuuucagaaaccacaacaaguuuaagccccgacaauaccucaacccaaguuucucccgacucucuggacaaugccagugcauucaacacaacagguguaagcagcguucaaaccccucaccuaccgacacaugcugacagucaaacuccaucugcaggaaccgauacacaaacuuuuucaggcucugcugcaaaugcuaaacuaaaucccacaccaggaucuaacgccaucucagacguaccuggugaacgaagcacugcuagcacauucccaacugaccccguuaguccccucacaacgacacuuagucucgcacaucacaguucagcugcccuaccugcaaggaccucaaauacuacaauaaccgcuaauaccagcgacgcuuaccuaaaugcuuccgaaaccacaacccuauccccuuccggaagcgcaguuauuucgaccacgacaauugcaaccacaccaucuaaaccuacaugugacgaaaaauacgccaacauaaccguagacuaucuauacaacaaggaaacaaaacuauuuaccgcaaaauuaaaugugaacgaaaaugucgaauguggaaacaauaccugcacaaauaaugaaguacauaaccuaacagaaugcaaaaacgccucuguaucgauaucacacaacucauguacugccccggauaaaacccuaauuuuagauguaccaccuggagucgagaaauuccaauuacaugacugcacacaaguagaaaaggcagauacuacgauaugucuaaaauggaaaaacauagaaacauucacaugugauacucaaaacaucacauaccgguuucaauguggaaauaugaucuuugauaacaaggaaaucaagcuagagaaccucgaaccagaacaugaauacaaaugcgacucugaaauauuauacaauaaucacaaauuuacaaacgcauccaaaauuauuaaaacagacuucggaucaccuggagaaccccaaauaauauucugcagaucagaagcagcccaccaaggaguuaucaccuggaauccaccacaaagaucauuccauaacuucacccuuugcuacauaaaagaaacagagaaggacuguuuaaaccuagacaaaaaucuaauuaaauaugaucuucaaaaccuuaaaccauauacaaaauacguacuuucguuacacgccuauauuaucgcaaaaguucaaagaaauggauccgcagccaugugccacuucaccacgaaaucugcacccccuucucaaguuuggaauaugacagucagcaugacgagugauaacucaaugcacguaaaaugucgaccaccacgagaccgaaauggcccacacgaacguuaccaccucgaaguagaagccggaaacacauuaguuagaaacgaaucgcauaaaaacugcgauuuuaggguuaaagauuuacaauacuccacagauuacacauucaaagccuacuuucauaacggagacuaucccggagaaccauuuauauuacaucacucuaccucauacaauaguaaagcucuaaucgcauuuuuagcuuucuuaauaauagucaccucuauagcauuacuuguaguacucuauaaaauauacgaucuacacaaaaagagaucauguaacuuagaugaacaacaagaauuaguggaaagagacgacgaaaaacagcuaaugaacguagaaccaauacaugccgacauacuacuagaaacauauaaaagaaaaaucgcugacgaagguagacuauuucuugcagaguuccaauccauuccaagaguauuuucaaaauuuccaauaaaagaagcacguaaaccauucaaucaaaacaaaaaccguuacguugauauuuuaccauaugacuacaaucgcguagaacucucagaaauuaacggggaugcagguuccaacuacauaaacgccucauauauagacggauucaaagaaccccgaaaauacauagcagcucaagguccaagggacgaaacaguagaugauuucuggaggaugauaugggaacaaaaagccacaguaauagucaugguaacaaggugugaagaaggaaaccguaauaaaugcgcggaauacuggccaucaauggaagaagguacaagagcuuucggcgacgucgucguaaaaauaaaucaacacaaaagaugcccagacuauaucauucagaaauuaaacauaguuaauaagaaagaaaaagcaacaggaagagaaguaacacauauucaauuuacaaguuggcccgaccacggaguacccgaagauccacaucugcuacuaaaacuacgacgcagaguaaaugccuuuaguaacuucuuuagcggacccauuguaguucacugcucagcuggagucggcagaaccgguacauauauagguaucgacgcaaugcucgaaggccuagaagcugaaaauaaaguagacguuuauggauauguugucaaauuaagacgccaaagaugcuuaaugguacaagucgaggcgcaauacauacucauccaccaagcccuagucgaauauaaccaauuuggcgagacugaagucaauuuauccgaauuacauccauaucuucacaauaugaagaaaagagacccgccuucagaaccaucuccacuagaagcugaauuucaaagacuacccucuuacagaucauggcguacucaacauauagggaaucaagaagaaaauaaaaguaaaaaccguaacucaaacgucauacccuacgacuauaauagaguaccucucaaacacgaauuagaaaugucuaaagaaucugaacaugauucagacgaaucuucagaugacgauucugacuccgaagaaccaucuaaauacauaaacgcuagcuuuauaaugucuuacuggaaaccagaggucaugaucgccgcacaagguccucuuaaagaaaccauaggagacuuuuggcaaaugauauuccaaagaaaagucaaaguuauuguaauguuaacugaacuaaaacacggagaccaagaaaucugugcgcaauacuggggcgaagguaaacaaacauacggcgauauugaagucgaccuaaaagacacagacaaauccagcacuuauacuuuaagaguauucgaauuacgucauaguaaaagaaaagauuccagaacaguauaucaauaccaguauaccaauuggaguguagaacaauuacccgcugaaccaaaagaguuaauaucuaugauacaagucgucaaacaaaaacuuccccagaaaaacaguuccgaaggaaacaaacaccauaaauccacgccuuuauuaauacacuguagagacggcucucaacaaacaggcauauuuugcgcuuuacucaaucuauuagaguccgccgaaaccgaagaaguaguagauauauuccaaguugucaaagcucuaaggaaagcacgcccaggaauggucagcacauucgaacaauaucaauuucucuaugacgucauagccucaaccuauccagcacaaaacggacaaguaaagaaaaacaaccaucaagaagauaaaauagaguucgauaaugaaguagacaaaguuaaacaagacgccaauugugucaaucccuugggcgcaccggaaaaacuccccgaagcaaaagaacaagcggaaggcucugaaccaaccaguggcaccgaaggaccagaacauagcgucaauggacccgcuucgccagcauuaaaccaaggaucauaa

SEQ ID NO: 3949 - RNA, 624 nt, Artificial Sequence
  AAH02977 variant
auggcaaaaacauaugauuaccuauuuaaacuacuacuaauaggagauagcggaguagggaaaacaugcguacuauucagauuuagcgaagacgcauucaacagcacauucauaaguacaauaggaauagacuucaaaauaagaacaauagaauuagacggaaaaagaauaaaacuacaaauaugggacacggcaggacaagaaagauucagaacaauaacgacagcauacuacagaggagcaaugggaauaaugcuaguauacgacauaacaaacgaaaaaagcuuugacaacauaagaaacuggauaaggaacauagaagaacacgcaagugcagacguagaaaaaaugauauuaggaaacaaaugcgacguaaacgacaaaagacaaguaucaaaagaaagaggggaaaaacuagcacuagacuaugggauaaaauucauggaaacaagcgcaaaagcaaacauaaacguagaaaacgcauucuucacacuagcaagagacauaaaagcaaaaauggacaaaaaacuagaaggaaauucaccacaaggaagcaaccaaggaguaaaaauaacgccagaccaacaaaaaagaagcucauuuuucagauguguauuacuauaa

SEQ ID NO: 3950 - RNA, 1260 nt, Artificial Sequence
  BAA81688 variant
augaaaaacuacaaagccauagggaaaauaggagaaggaaccuucucagaaguaaugaaaaugcaaucacuaagagacggcaacuauuacgcaugcaaacaaaugaaacagagauucgaaucaauagaacaaguaaacaaccuaagagaaauacaagccuuaagaagacuaaacccacacccaaacauacuaaugcuacacgaaguaguauucgaucgaaaaagcggaucacuagcacuaauaugcgaauuaauggacaugaacauauacgaacuuauaagaggacgaagauaccccuuaucagaaaaaaaaauaaugcauuauauguaucaauuaugcaaaagccuagaccauauccacagaaacggcauauuccaucgagacguaaaacccgaaaacauacuaauuaaacaagauguccucaaacuaggagacuuuggaucaugccgaucaguauacucaaaacagccauacacagaauacauaucaacaagaugguaccgagcaccagaaugccuacuaacagacggauuuuacacauacaaaauggaucucugguccgcaggaugcguauucuacgaaauagcauccuuacaaccccuauucccaggcguaaaugaacuagaucaaauaagcaaaauacacgacguaauaggaacaccagcacaaaaaauacuaacaaaauucaaacaaucuagagcaaugaacuucgauuuccccuuuaaaaaaggaucaggcauaccucuacucaccacaaaucuaagcccccaaugucuaucacucuuacaugcaaugguagcauacgauccagacgaaagaauagcagcccaucaagcacuacaacacccauacuuccaagaacaaagaaaaaccgaaaaacgcgcccuaggcucacauagaaaagccggauucccagaacacccaguagcaccagaaccacuaucaaacuccugucaaauaucaaaagaaggaagaaaacaaaaacaaucccuaaaacaagaagaagacagaccaaaacgaagaggaccagcauacguaauggaacucccaaaacuaaaacucuccggaguugucagacuaucaucauauucuucccccacauuacaaucuguacuuggaucuggaacuaaugguagaguaccaguuuuacgcccacuaaaaugcauaccagcaucaaaaaaaacagacccacaaaaagacuuaaaaccagcaccacaacaauguagauuaccaacaauaguccgaaaaggaggaagauaa

SEQ ID NO: 3951 - RNA, 1389 nt, Artificial Sequence
  AAH08727 variant
auggccucaaauucaagcucaugcccaaccccugguggaggacaccuaaauggauacccaguaccuccauacgcauucuuuuuuccuccuaugcuaggcggauuaaguccuccuggcgcucuaacaacccuacaacaucaauuaccagucucaggauauucaacucccucaccagcaacaauagaaacacaaaguucaucaucagaagaaauuguaccaaguccaccaucuccuccacccuuacccaggauauacaaaccaugcuucguaugucaagacaaaucaucaggauaccacuacggcguaucugccugugaaggaugcaaaggauuuuuccgacgcucuauccaaaaaaauaugguauauacaugccacagagacaaaaauugcauaauaaauaaaguaacuagaaacagaugccaauacugcagacuucaaaaauguuuugaaguugguauguccaaagaaucaguacguaaugacagaaauaaaaaaaaaaaagaagucccaaaaccagaauguucggaaucauacacucuaacaccagaaguaggagaacucauagaaaaaguacgaaaagcacaccaagaaacauuccccgcuuuaugucaacuaggcaaauacacaaccaacaacuccucagaacaaagaguaaguuuagacauagaucucugggacaaauucucagaacuauccacaaaauguauaauaaaaacaguagaauucgccaaacaauuaccaggauuuacaacauuaacaaucgcagaccaaauaacacucuuaaaagcugcauguuuagauauauuaauacuacgcauaugcacaagauacacaccagaacaagacacaaugacauucucagauggacuuacacuaaacagaacacaaaugcacaaugcuggauucggaccacuaacugacuuaguauuugcauucgcaaaccaacuucuaccacuagaaauggaugaugccgaaacaggacuacuaucagcaauaugcuuaauaugcggagacagacaagacuuagaacaaccagacaggguugauaugcuacaagaaccauuauuagaagcauuaaaaguauauguacgaaaaagaagaccaucucgaccacacauguuuccuaaaaugcuuaugaaaauuacagaccuaagaucaauaagugcaaaaggugcagaacgaguuauaacuuuaaaaauggaaaucccuggauccaugccaccccuaauacaagaaauguuagaaaauucagaggguuuagauacuuuaucaggacaaccaggaggaggaggccgagauggaggaggacuagcaccacccccaggauccugcucaccaucccuaucaccaucuagcaaccguucaucaccagcaacacacucaccuuaa

SEQ ID NO: 3952 - RNA, 570 nt, Artificial Sequence
  AAB02605 variant
augacagaauauaaauuaguaguaguaggagcagggggaguaggaaaaagcgcacuaacaauacaacuaauacaaaaucacuucguagaugaauaugauccaacaauagaagacagcuacagaaaacaaguaguaauagacggagaaacaugccuacuagacauacuagauacagcaggacaagaagaauauagugcaaugagagaccaauauaugagaacaggagaaggauuucuaugcguauuugcaauaaacaacacaaaaucauucgaagacauacaucaauacagagaacaaauaaaaagaguaaaagacagcgacgauguaccaaugguauuaguaggaaauaaaugcgaccuagcagcaagaacaguagaaaguagacaagcacaagaccuagcaagaucauacggaauaccauacauagaaacaagcgcaaaaacaagacaaggaguagaagacgcauucuacacgcuaguaagagaaauaagacaacauaaauuaagaaaacuaaauccaccagacgaaagcggacccggaugcaugaguuguaaauguguauuaaguuaa

SEQ ID NO: 3953 - RNA, 570 nt, Artificial Sequence
  AAB59445 variant
augacagaauacaaacuaguaguaguaggagcaggaggaguaggaaaaagcgcacuaacaauacaacuaauacaaaaccacuucguagacgaauacgacccaaccauagaagacucauacagaaaacaaguaguaauagacggagaaacaugccuacuagacauacuagacacagcaggacaagaagaauacagcgcaaugagagaccaauacaugagaacaggagaaggauucuuaugcguauucgcaauaaacaacacaaaaucauucgaagacauacaccacuacagagaacaaauaaaaagagucaaagacagcgaagacguaccaaugguacuaguaggaaacaaaugcgaccuaccaucaagaacaguagacacaaaacaagcacaagaccuagcaagaagcuacggaauacccuucauagaaacaucagcaaaaacaagacaaagaguagaagacgcauucuacacacuaguaagagaaauacgacaauacagacuaaaaaaaauaucaaaagaagaaaaaacaccaggaugcguaaaaauaaaaaaaugcauaauaauguaa

SEQ ID NO: 3954 - RNA, 570 nt, Artificial Sequence
  AAA60255 variant
augacagaauauaaauuaguaguaguaggagcaggaggaguaggaaaaagugcacuaacaauacaacuaauacaaaaccacuucguagaugaauacgacccaacaauagaagacagcuacagaaaacaaguaguaauagacggagaaacaugcuuacuagacauauuagacacagcaggacaagaagaauacagcgcaaugagagaccaauacaugagaacaggagagggauuccuauguguauucgcaauaaacaacagcaaaagcuucgcagacauaaacuuauauagagaacaaauaaaaagaguaaaagacucagacgauguaccaaugguacuaguaggaaauaaaugcgaccuaccaacgagaacaguagacacaaaacaagcacacgaacuagcgaaaucauacggaauaccauucauagaaacaagcgcaaaaacaagacaaggaguagaagacgcauucuacacacuaguaagagaaauaagacaauacagaaugaaaaaacuaaacagcucagacgacggaacacaaggaugcaugggauuaccaugcguaguaauguaa

SEQ ID NO: 3955 - RNA, 546 nt, Artificial Sequence
  AAB84001 variant
augugcaaaggacuagccgcacuaccacacucaugccuagaaagagcaaaagaaauaaaaauaaaacuaggcauacuacuacaaaaaccagacucaguaggagaccuaguaauaccauacaacgaaaaaccagaaaaaccagcaaaaacucaaaaaacaucauuagacgaagcacuacaauggagagacucacuagacaaacuacuacaaaacaacuacggacuagcaucauucaaaucauucuuaaaaucagaauucucagaagaaaaccuagaauucuggauagcaugcgaagacuacaaaaaaauaaaaucaccagcaaaaauggcagaaaaagcaaaacaaauauacgaagaauucauacaaacagaagcaccaaaagaaguaaacauagaccacuucacaaaagacauaacaaugaaaaaccuaguagaaccaucacuaagcucauucgacauggcacaaaaaagaauacacgcacuaauggaaaaagacucacucccaagauucguaagaagcgaauucuaccaagaacuaauaaaauaa

SEQ ID NO: 3956 - RNA, 2175 nt, Artificial Sequence
  CCDS4362.1 variant
augagcuuuccaaaagcaccgcuaaaaagauuuaacgacccaagcggaugugcaccaagcccaggugcauacgacguaaaaacacuagaaguacuaaaaggaccaguaucauuccaaaagagccaacgcuucaaacaacaaaaagaauccaaacaaaaucucaacguagauaaagauacaacucuaccagcaagcgccagaaaaguaaaaucaagugagucaaaagagagucaaaagaacgauaaagaccuaaaaauacucgaaaaagaaauaagaguccuacuacaagaaagaggagcccaagaccguagaauacaagaucuagaaacagaacuagagaaaauggaagcaagauuaaacgcggcucuuagagagaaaacaucacuauccgcaaacaaugcuacacuagaaaaacaacuaauagaauuaacuagaacaaacgaacuacugaaaagcaaauucagugaaaacggaaaccagaaaaaucuaagaauacuaagccuagaacuaaugaaacuaagaaacaaacgagaaacaaaaaugagaggaaugauggccaaacaagaaggaauggaaaugaaauuacaaguaacacaaaggucauuagaggaaagucaagggaaaaucgcccaacuagaaggaaagcuaguaucaauagaaaaagagaaaauagacgagaaaagcgaaacagaaaaacuauuagaauauauagaagaaauaucaugugcaucugaccaaguagaaaaauacaaacuugacauagcgcaacuagaagaaaaucucaaagagaaaaacgacgaaauauuaagucuaaaacaaagucuagaagaaaauauaguaauccuaagcaaacaaguugaagaccuaaauguaaaaugccaauuacucgaaaaagaaaaagaagaccacgugaaccgaaaccgagaacauaaugaaaaccuaaaugccgaaaugcaaaaccugaaacaaaaauucauacuagagcaacaagaaagagaaaaauugcaacaaaaagaauuacaaauagauucucuauuacaacaagagaaagaacuauccucaagccuacaccaaaaacucugcagcuuucaagaggaaaugguaaaagagaaaaaccuauucgaagaagaacuaaaacaaacacuagacgaacuugacaaacuacaacaaaaagaagaacaagcagaaaggcuagucaaacaacuagaagaagaagcaaaaucaagagcggaagaacuaaaacuauuggaagaaaaacuaaaaggcaaagaagcugaauuagaaaagagcagugcggcacacacacaagccacucuacuauuacaagaaaaauaugacucaaugguccaaagccuagaagacgucacagcacaauucgaaucauacaaggcuuuaacagcauccgaaauagaagaccuaaaacuagaaaauuccagccugcaagaaaaagcagcaaaagcagguaaaaacgcagaagacguacaacaccaaauacuagcaacagaaaguagcaaucaagaauacguacgaaugcuauuagaccuccaaacaaaaucagcauuaaaagaaacagaaaucaaagaaaucacagucagcuuccuacaaaagauaacagaccuacaaaaucaacuaaaacaacaagaagaagacuuccgaaagcaacuggaagacgaagaaggacgcaaggccgaaaaagaaaacacuacagccgaacuaacggaagaaauaaacaaauggaggcuacuuuaugaagaauuguacaauaaaaccaaaccauuccaauuacaacuagaugcauucgaaguagagaaacaagcccuccucaaugaacauggagcugcacaagaacaacuaaacaaaauacgcgacaguuaugccaaauuacuaggccaccaaaacuuaaaacagaaaauuaagcauguaguaaaacuaaaagacgaaaacucccaauuaaaaucagaaguaaguaaauuaagaugucaauuagcuaaaaagaaacaaucagaaacaaaacuacaagaagaacuaaacaaagugcuaggaaucaaacacuucgacccaaguaaagcauuucaccaugagucaaaagaaaacuuugcauuaaaaacgccauuaaaagaaggaaacaccaacugcuacagagcaccaauggaaugucaagagaguuggaaauaa

SEQ ID NO: 3957 - RNA, 582 nt, Artificial Sequence
  AAC33179 variant
auggcagcaauaagaaaaaaacuaguaauaguaggagacggagcaugcggaaaaacaugcuuacuuauaguauuuagcaaagaccaauucccagaaguauacguaccaacaguauuugaaaacuacauagcagauauagaaguagauggaaaacaaguagaauuagcacuaugggauacagcaggacaagaagauuacgauagauuaagaccacuaucauacccagacacagacguaauauuaaugugcuucucaauagauaguccagacucauuagaaaacauaccagaaaaauggacaccagaaguaaaacauuucugcccaaauguaccaauaauauuaguagguaauaaaaaagacuuaagacaagacgaacacacaagaagggaauuagcaaaaaugaaacaagaaccaguaagaucagaagaaggaagagauauggcaaacagaauaagcgcauucggauacuuagaauguagugcaaaaacaaaagaaggaguaagagaaguauuugaaauggcaacaagagcaggauuacaaguaagaaaaaauaagagaagaagaggaugcccaauauuauaa

SEQ ID NO: 3958 - RNA, 888 nt, Artificial Sequence
  AAA36161 variant
augagcggagcauuagacguauuacaaaugaaagaagaagacguacuaaaauuccuugcagcaggaacacauuuaggaggaacaaaccuagacuuccaaauggaacaauacauauacaaacgaaaaucagauggaauauacauaauaaauuuaaaaagaacaugggaaaaacuauuauuagcagcaagagcaauuguagcaauagaaaauccugcugacguaucaguaaucucaucaagaaacacaggucaaagagcaguguuaaaauuugcagcagcaacaggagcaacaccaauagcaggaagauucacaccaggaacauucacaaaucaaauacaagcagcauuuagagaaccaagacuauuaguaguaacagauccaagagcagaucaccaaccacuaacagaagcaucauacguuaacuuaccaacaauagcacuuuguaacacagacaguccauuaagauacguagauauagcaauaccaugcaauaacaaaggagcucacucaguaggauuaaugugguggauguuagcaagagaaguacuacguaugagaggaacaauaucaagagaacacccaugggaaguaaugccagacuuauauuuuuauagagacccagaagaaauagaaaaagaagaacaagcagcagcagaaaaagccguaacuaaagaagaauuucaaggagaauggacagcaccagcaccagaauuuacagccacacaacccgaaguagcagacuggucagaaggaguacaaguaccaucaguaccaauacaacaauucccaacagaagacuggagugcacaaccagcaacagaagacuggagcgcagcaccaacagcacaagcuaccgaauggguaggagcaacaacagacuggucauaa

SEQ ID NO: 3959 - RNA, 2601 nt, Artificial Sequence
  AAH14614 variant
augaauggagaacaacaauuagaugcagaugcaggcucuggaauggaagaaguugaauuaaguugggaagauuaucuugaagaaacaggaucaaccgcaguaccauauggaucauucaaacauguagauacaaggcuccaaaacggauuugcacccggaaugaaauuagaaguugcaguaagaacugauccagaaacuuacuggguugcaacaguaauuacaaccugugaacaauuacuacuuuuaagauacgauggauauggagaagauagaagagcagacuuuuggugugauauaagaaaagcagaucucuauccaauagguuggugugaacaaaacaaaaaaacuuuagaagcaccggaagguaucagagacaaaguaagcgacugggaugaauuccuaagacaaacacuuauaggagcauguucaccaccgguuccauuacucgaaggcuuacgaaauggucgaaauccacuggauuuaauugcaccaggaucgagauuagaaugccaggcauuucaagauucauuaaguacauggauaguaaccguuguugaaaacauaggggggagauuaaagcuaagguaugagggacuagaaucaucagacaacuaugaacauugguuauauuacuuagauccauuucuacaucacguagguugggcagcacaacaaggauaugaauuacagccaccaagcgcuauaagacaucuuaagaacgaagcagaauggcaagaaauauuagcuaaaguaaaagaagaagaggaagaaccauuaccuagcuauuuauuuaaagacaaacaagucauaggaauacacacauucucgguuaacaugaaauuagaagcaguagauccauggaguccauucggcauaucaccggcaacaguuguaaaaguauuugaugaaaaguacuuucucguagaaauggaugaucuaagaccagaaaaccaugcuagacgaaguuuuguaugccaugcagauucaccgggcauauuuccuguacaauggucuuuaaagaacggauuacauauuucacccccuccaggauauccuagucaagauuuugauugggcagacuaucuaaaacaauguggugcagaagcagccccacaaaggugcuucccaccacuaauaucagaacacgaguuuaaagaaaacaugaagcuagaagcaguaaauccaauuuuaccugaagaaguaugcguagcuacaauaacagccguaagagguuccuaucuauggcuccaauuagaaggaucaaaaaaaccaauaccagaaugcauaguuucaguagaaucaauggauauauuuccauuaggauggugugaaacaaauggacauccgcuauccacaccucguagagcacgaguauauaaacaaaggaaaauagcaguuguccaaccagaaaaacaagugccaucaagcagaacaguucaugaaggacuucgcaaucaagaauuaaacucaacagaaucuguuaugauaaauggaaaauacuguuguccaaaaauauacuuuaaccacagauguuuuaguggaccauaucuaaauaaaggaagaaucgcagaauuaccucaauguguaggcccagggaauugcguauuaguacuaagagaaguauugacccucuugauuaaugcagcauauaaaccuucacgaguuuuaagggaauuacaauuagauaaagauucaguuuggcauggauguggagaaguacuuaaagcgaaauauaagggaaaauccuacagagccacaguagaaaucgugaaaacagcagaccgaguaacagaguucugcaggcaaacuugcauaaaacuggaauguugcccaaauuuauuugggccacguaugguauuggauaaaugcucugaaaacugcucugucuuaacaaaaacaaaauauacgcauuauuaugguaaaaaaaaaaacaaacgaauuggacgcccgccgggaggccauuccaaccuggccugcgccuugaaaaaagcaucuaaaaggagaaaaagaagaaagaauguauucguacacaaaaaaaaaagaagcagcgcaucaguagacaacaccccagcuggaucaccucaaggaucaggaggagaagaugaagaugauccagacgagggcgaugaugauagucuaagcgaaggaagcacaagcgaacaacaagaugaacuacaagaagaaagcgagaugucugaaaaaaaaucuuguucuuccucaccaacccaguccgaaauuaguacgucauuaccacccgaucgacaaagaaggaaacgagagcuaagaacauuuagcuucucugaugaugaaaauaaacccccaagucccaaagaaauccgaauagaaguagcagaaagauuacaucuagauaguaauccucugaaauggucaguugcugauguaguaagauuuaucagaaguacagauugcgcaccccuagcaagaaucuuucuagaucaggaaaucgacggucaggcauuacuguuauuaacauugccaacuguacaggaaugcauggaucucaaauuaggaccugcaauaaaauuaugucaucauauugaaagaauaaaguuugcuuucuacgaacaauucgcaaauuaa

SEQ ID NO: 3960 - RNA, 1431 nt, Artificial Sequence
  CCDS4550.1 variant
augagcggaucuucagcacgaaguucacaucuaucacaaccagucguaaaaaguguacuaguauauagaaacggagauccauuuuacgccggaagaagaguaguaauacaugaaaaaaaaguaaguucauuugaaguauucuuaaaagaaguaacaggggguguacaagcaccauucggagccguuagaaauauauauacaccaagaacaggacacaggauaagaaaacuagaucaaauacaaagcggaggaaacuauguagcaggagggcaagaagcauuuaaaaaauugaauuacuuagauauuggcgaaauaaaaaaaagaccaauggaaguagugaauacggaagugaaaccaguuauacauucaagaauaaacguaagugcaagauuuagaaaaccauuacaagaaccauguacuauauuucuaauagcaaauggagauuuaauaaauccagcauccagauuacuaauaccaagaaaaacauuaaaucaaugggaccacguacuacaaaugguaacagaaaaaauaacacuaagaucaggagcaguucacagacucuauacacucgaagguaaauuaguggaaucgggcgcagaauuagaaaacggacaauuuuacguagcaguuggaagggauaaauucaaaaaacuaccauacucagaauuacuauucgauaaauccacaaugagaagaccauucggacaaaaagcaagcucacuacccccgaucguaggaucacgaaaaaguaaagguucaggaaacgauaggcauucaaaaucaacaguaggaucaagcgauaauucaaguccacaaccacucaaacgaaaaggaaaaaaagaagacguaaauagugaaaaacuaacaaaacuaaaacaaaauguaaaacuaaaaaacagucaagaaacaauaccaaauagugaugaaggaauauucaaagcaggagcagaacgcucagaaacccgaggagcagcagaaguacaagaagaugaagauacacaaguagaaguaccuguagaccaaagaccagcagagauaguagacgaagaagaagacggugaaaaagcgaauaaagacgcagaacaaaaagaagacuucaguggaaugaauggggauuuagaagaagaaggaggacgagaagccacagaugcaccagaacaaguagaagaaauacuagaccauucagaacaacaagcaagaccagcgagaguuaauggaggaacagacgaagaaaacggagaagaauuacaacaaguaaauaacgaauuacaauuaguucuagacaaagaacgaaaaagccaaggagcaggaaguggacaagacgaagcagauguagacccacaaagaccaccaagaccagaaguaaaaauaacaagcccagaagaaaaugaaaacaaccaacagaacaaagacuaugcagcaguggcuuaa

SEQ ID NO: 3961 - RNA, 1362 nt, Artificial Sequence
  BAA07903 variant
augcgcauuccuguagaugcaucaacaucuagacgauuuacucccccaucuacagcacucuccccaggcaaaaugucugaagcacuaccauuaggagcaccagaugcaggagcagcuuuagcagguaaauuaagaucaggagauagaucaaugguagaagucuuagcugaccacccuggagaacuuguuagaacagauuccccaaacuucuuauguucuguauuaccaacacacuggcguuguaacaaaacauuaccaauagcauucaaaguaguagcacucggugacguaccagacggaacucuaguaacaguaauggcaggcaaugacgaaaauuauuccgccgaacuaagaaaugcaacagccgcaaugaaaaaccaaguagcacguuucaaugauuuaagauuuguagguagaucuggaagagguaaaucauucacauuaacaauaacaguauuuacaaauccaccucaaguagccacauaccacagagcuauaaaaauaacaguagauggcccucgagaaccaagacgacauagacaaaaauuagaugaccaaacaaaaccuggcaguuuaucauuuucagaaagauuaucagaacuagaacaacuacgcagaacagcaaugcguguuucaccacaccauccugcucccacacccaacccaagagcaucacuaaaccacuccacagccuuuaauccacaaccccaaucacaaaugcaagacaccagacaaauucaaccuucaccaccauggagcuacgaucaaucauaccaauacuuaggauccaucgcaucuccaucaguccauccugcaacacccauaucacccggacgagcaucagggaugacaacacuaucagcagaacucucaucuagauuaucaaccgcaccagaucuaacugccuucucagaucccagacaauuuccugcacucccaucaauuagugacccaagaaugcauuauccuggagcauuuacuuauuccccaacuccaguuacauccggcauaggcaucggcauguccgcaaugggcuccgcuacaagauaccacacauaucucccuccuccauauccaggaucuucucaagcacaaggagguccauuucaagcaucuucuccauccuaucauuuauauuacggugccucagcaggcucauaccaauuuucaauggucggaggagaacgauccccacccagaauauuaccaccauguaccaaugcaucaacaggcucagcacuuuuaaauccuucuuuaccaaaucaaucugauguuguagaagcagaagguucacacucaaauucaccaacaaacauggcaccaucugcacgacuagaagaagccguuuggagaccauauuaa

SEQ ID NO: 3962 - RNA, 1080 nt, Artificial Sequence
  ACI46041 variant
augccauuagaauuagaacucugcccaggaagauggguaggaggacaacauccaugcuuuauaauagcagaaauaggacaaaaucaucaaggagauuuagacgucgcaaaacgaaugauaagaauggcaaaagaauguggagccgacugugcaaaauuccaaaaaucugaacuagaauucaaauuuaacagaaaagcacuagaaagacccuauacaagcaaacacucauggggaaaaacauauggagaacacaaaagacauuuagaauucagccacgaucaauacagagaacuacaaagauacgcagaagaaguaggaauauuuuucacugcaucaggaauggaugaaauggcaguagaauuucuacacgaauuaaacguaccauuuuucaaaguaggaagcggagacacaaacaauuuuccauacuuagaaaaaacagcaaaaaaaggaagaccaaugguaauaucaagcggcaugcaaucaauggacacaaugaaacaaguauaccaaauaguaaaaccauuaaacccaaacuucuguuucuuacaaugcacaucagcauacccuuuacaacccgaagacguuaaccucagaguuauaagcgaauaccaaaaacuauuuccagacauaccaaucggauauaguggacaugaaacaggaaucgcaauaagcguagcagcaguagcacuaggagcaaaaguacuagaaagacauauaacauuagacaaaacauggaaaggaagugaccauucagcgagccuagaacccggagaacuagcagaacuaguaagaucaguaagauuaguagaaagagcacuaggaagccccacaaaacaacuauuaccaugcgaaauggcaugcaacgaaaaacuuggaaaaagcguaguagcaaaaguaaaaauaccagaaggaacaauacuaacaauggacaugcuaacaguaaaaguaggagaaccaaaagcauauccaccggaagacauauuuaaccuaguagguaaaaaaguacuaguaacaguagaagaagacgauacaaucauggaagaauuaguagacaaccacggaaaaaaaauaaaaucauaa

SEQ ID NO: 3963 - RNA, 2715 nt, Artificial Sequence
  CCDS14652.1 variant
augcaagcaucuccacuacaaacaucccagccuacacccccagaagaacuacaugcagccgcauaugucuucacaaaugauggacaacaaaugcguucugaugaaguaaacuuaguagccacuggacaucaauccaaaaagaagcacucacguaaauccaaacgccacaguucaucaaaacgaagaaaaucaauguccuccuggcucgacaaacaagaagacgcagcaguaacacacaguauaugugaagaacgaauaaauaauggccaaccaguugccgacaacguauuaagcacagcaccaccauggcccgacgcaaccauagcacauaacauaagagaagaacgaauggaaaauggccaaagccgcacagacaaaguacuaucaacagcaccuccucaauuaguacacauggccgcagcaggaauaccuucaaugagcacaagagaccuacauuccacaguaacccauaauauacgagaagaacgaauggaaaacggacaaccacaaccagauaacguacuuucaacaggacccacaggcuuaauaaacauggcagccacacccauacccgccauguccgcaagagaucuauaugcaaccguaacucauaacguuugugaacaaaaaauggaaaacguucaaccagcaccagacaacguacuguuaacacucagaccaagaagaauaaauaugacagacacaggaauaaguccaaugagcacaagagacccauaugcaacaauaacuuauaauguccccgaagaaaaaauggaaaaaggacaaccacaaccagacaacauuuuaucuacagcuucuacugguuuaaucaauguagcaggagcaggaacaccagcaauauccacuaacggauuauauucaaccguaccacacaacguuugcgaagaaaaaauggaaaacgaccaaccacaaccuaacaacguacuaucaaccguacaaccagucaucauauacuuaacagcaacugguauuccaggaaugaauacaagagaucaauaugcuacaauuacucacaacgucugcgaagaaagaguuguuaauaaucaaccucuaccuucaaacgcccugucaacgguacucccaggcuuggccuaucuugcgacagcagacaugccugcaaugaguacaagagaccaacacgcgaccaucauacacaacuuaagagaagaaaagaaagacaacucacaaccuaccccggauaauguauuauccgcaguaacaccagagcucauuaacuuagccggcgcaggcauuccucccaugucaacacgugaccaauaugcaacuguaaaccaucacguccaugaagcccgaauggaaaauggucaaaggaaacaagauaacguucucucaaaugucuuguccggauuaauaaauauggcaggagcaucuaucccagcuauguccuccagagaccuauacgccacaauuacacauucaguacgagaagaaaaaauggaaucuggaaaaccacaaacagacaaaguaauaaguaacgaugcgccacaacucggucacauggcagcuggaggaaucccuaguaugucaacaaaagacuuauaugcaacugucacacaaaauguccaugaagaacgcauggaaaacaaccaaccucaaccuucguacgaccuaucuaccguccuaccugguuuaacauaccuuacaguugcagguauuccugcaaugucaacucgagaccaguaugcaacaguaacacauaauguacaugaagaaaaaauaaaaaauggucaagcagcaucugacaacgucuucucgacagugcccccugcauuuauaaauauggcagcuacaggaguuaguucaaugucaacucgcgaccaauacgcugcaguaacacacaacauacgggaagaaaaaauaaacaauucacaaccagcacccgguaauauacucucuacagccccuccuugguuacgacacauggccgccgccggaauuucaucaacaauuacacgagacuuauauguaacagcaacccauucaguccacgaagagaaaaugaccaacggacaacaagcaccagauaauucucuaaguaccgucccccccggcuguauaaaucucucaggagcgggaauaucgugucgaagcaccagagacuuauaugcaacaguaauacaugacauucaagaagaagaaauggaaaacgaccaaaccccaccugaugguuuccuaucaaauucagacucaccugaacuaauuaacaugaccggccacugcaugccaccaaacgcacuagacucauucucccaugacuuuaccucacugaguaaagaugaacuccucuauaaacccgauuccaaugaauuugcaguagguacgaaaaacuacaguguauccgcuggcgauccaccagucacuguaaugaguuuaguagaaacaguuccuaauacaccacaaaucucaccugcuauggcuaagaaaauaaaugacgauauaaaauaucaacuuaugaaagaaguacgcagauuuggacaaaacuacgaacguauuuuuauauuacuagaagaaguacaaggaucaaugaaagucaaacgucaauucguugaauucacaauaaaagaagcagcucgauuuaaaaaaguaguacuuauccaacaacuagaaaaagcucugaaagaaauagauucccauugccauuuaagaaaagucaaacauaugagaaaacgauaa

SEQ ID NO: 3964 - RNA, 2403 nt, Artificial Sequence
  AAH01058 variant
augggaagcaguaaaaagcauagaggagaaaaggaagcagcaggaacaacagcagcagcaggaacaggaggggcaacagaacaaccgccaagacaucgagaacacaagaaacacaaacacaggucaggggguucaggggguucgggaggagaaagaagaaaaaggagcagagaaagagggggagaacgaggaucagggagaaggggagcugaagcggaagcuagaucaagcacacacgggagagaaagaagucaagcggaaccaagugaaagaaggguaaaacgagaaaagagagacgaugguuaugaagcggcagcuaguucgaaaacaagcucaggugacgcuucaagccuaagcauagaagaaacaaauaaauuaagagcuaaacuaggauuaaaaccauuagaaguaaaugcuauaaagaaagaagcaggaacaaaagaagaaccagucacugcugauguaauaaacccaauggccuuaaggcaacgcgaagaacuaagagaaaaguuggcugcagcgaaagagaaaaggcuacuaaaucaaaagcugggaaaaauuaaaacguuaggagaagaugaucccugguuagaugauaccgcagccuggauagaaagaucucgacaacuacaaaaagaaaaagaccuggcagagaaaagagcaaaacuauuagaagaaauggaccaggaauuuggaguuaguacacugguagaagaagaguucggacaacgaagacaagauuuauacucggcaagagaucugcaaggguuaacuguggaacaugccauugacucauucagagaaggagaaacaaugauucuaacacuuaaggauaaaggagucuuacaggaagaagaagauguucuaguaaauguuaaucuaguagauaaagaaagagcggagaaaaacguagaauugaggaaaaagaaaccagauuauuuaccauaugcagaggacgaaaguguagaugauuuagcacaacaaaaaccgagaucgauauuaagcaaauacgaugaagaauuagaaggagaaagaccccauucauucagacuugaacaaggagggaccgcagacggauugagggaaagagaacuggaagaaauaagagcaaaauuaagacugcaagcacaaagucuaucaacggucgguccucgacuagcgagugaguauuugacaccagaagaaaugguaacauucaagaaaacaaaaaggagaguuaagaaaauaaggaagaaagagaaagaagucguaguaagagcggaugaccuauugccacuaggcgaucaaacgcaagauggagacuucgggucaagacugagagggagaggaagaagaaggguaucugaaguagaagaagaaaaagagccagucccucagccacuaccaagcgaugacacaagaguugaaaauauggauauaucagaugaagaagagggaggggccccaccaccagggucgccacaaguucuagaagaagacgaagcagaauuagaauuacaaaaacaacuggaaaaagggagaagacuacggcaauugcaacaauuacaacaauuaagagauagcggagagaaagugguagaaauaguaaagaaauuggaaaguagacaaagagggugggaagaagaugaggauccggaaagaaaaggagcgauagucuucaaugcaacaagcgaauuuuguagaacguuaggagaaauaccuacauauggucuugccgggaauagagaagaacaagaagaauugauggauuucgaaagggacgaagaacggagcgccaauggaggcucagaaucggauggggaggaaaauauaggauggaguacaguuaacuuagaugaagaaaaacaacaacaagauuuuucagcaucuaguacgacaauucuagaugaagaaccgauaguuaacagaggauuagcggcugcucuacuauugugccaaaauaaaggacuauuggaaacaacaguacaaaaaguagcaagagugaaagcaccaaacaaaaguuugccaucagcaguauacugcauugaagacaaaauggcuauugaugauaaauauagcagacgagaagaguauaggggauuuacacaagacuucaaagaaaaagauggguacaaaccagacguaaaaauagaguacguugacgaaacaggaagaaaauuaacgccaaaagaggcuuucaggcaauuaucacauagauuucauggaaaaggaagcgguaaaaugaaaacggaaagaagaaugaagaaacuugaugaagaagccuuauugaagaaaaugucgaguagcgacacuccauuaggaacaguagcguuacugcaagaaaaacagaaagcgcaaaagacgccauacauaguauuaucaggaagcggaaaaaguaugaacgcgaauacaauaacuaaauaa

SEQ ID NO: 3965 - RNA, 2877 nt, Artificial Sequence
  AAF00087 variant
augcgaacucauaccagaggagcacccucaguauuuuucauuuaccucuuaugcuuuguaagcgcauacaucacagacgaaaacccagaaguuaugauuccuuucaccaaugcaaauuaugauucccauccuauguuauacuucagccgagccgaaguagcagaacuucaauugagagccgcauccucucaugagcacauagcugcaagauuaacagaagcuguacauacaauguuaucaucuccgcuagaauaccuacccccaugggauccuaaagauuacuccgcgagauggaacgaaauauucgguaacaaccucggagcguuagccauguuuugcguuuuauauccugaaaauauagaagcuagagauauggcuaaagacuauauggaaagaauggccgcacaaccaucuuggcuaguaaaagacgccccaugggaugaaguaccauuagcacacuccuuaguuggauuugcaacagcauacgacuuucuauauaauuauuuaagcaaaacucaacaagaaaaauuucuagaagucauagcaaacgcuucagguuauauguaugaaaccucuuaccguagagguugggguuuucaguaccuucauaaucaucaacccaccaauugcauggccuuauuaacuggaagucuaguuuuaaugaaccaaggauaccuacaagaagcauauuuauggacuaaacaaguacucacuaucauggaaaaaucacucguccuacuacgagaaguaacugacgguucacucuaugaagguguagcauacggaucauauacaacuagauccuuauuucaauacauguuucuaguacaacgacacuucaauauaaaccauuucggacacccaugguuaaaacaacauuuugcauuuauguacagaacuaucuugccaggcuuccaaagaacaguagcaauagcggauucaaauuacaacugguuuuauggcccagaaucccaacuuguauuccuagauaaauuuguaaugagaaacggauccgguaauugguuagccgaucagauaagacguaacagaguaguagaagggccuggaacuccgucuaaaggucaaagauggugcacucuacauaccgaguuccuaugguaugauggguccuuaaaaucuguaccaccaccggacuuuggaacuccaacuuuacauuauuuugaagauuggggaguuguaacuuauggcucugcauuaccagcggaaauuaacagaucauuuuuguccuuuaaaucuggaaaauuaggcggcagagcaauauacgacauagugcauagaaauaaauacaaagauuggauaaaaggauggcgcaauuuuaaugcaggacaugaacaucccgaucaaaauucauuuacauuugcacccaacggaguaccauucauaaccgaagcauuauaugguccuaaauacacauuuuucaacaacguauuaauguuuucuccagcaguauccaaaucaugcuuuucuccauggguaggacaaguaacagaagacuguuccagcaaauggaguaaauauaaacacgaucuagcugcaucaugccaaggaagagucguagcugcagaagagaaaaaugguguaguauuuaucagaggagaaggagugggugcuuacaauccacaauuaaauuuaaagaauguucaacguaauuuaauucuauuacacccucaacuccuccucuuaguugaccaaauacaccuuggcgaagaaucucccuuagaaacagcagcauccuuuuuccauaauguugacgucccauucgaagaaacuguaguagauggaguucauggagcauucauaagacaaagagacggauuauauaaaauguauuggauggacgacacagguuacagugaaaaagcgacauuugccuccguuaccuauccuagaggcuacccauacaacggaacuaacuacguaaauguaacuaugcacuuaagaucuccuauaacccgugccgcuuacuuauucauuggaccaagcauagacguccaaucauucacaguacauggcgauagccaacaacuagacguauucaucgccacuucaaaacaugccuaugcaaccuaccuguggaccggagaagccacaggccaaucagccuucgcccaaguaauagcagacagacauaaaauccuuuuugacagaaauucagcaauaaaaucuucaauaguacccgaagugaaagacuaugcugccauaguugaacaaaaccuucaacauuucaaaccaguuuuccaacugcuagaaaaacaaauucuaaguaggguaagaaacaccgcuucuuuucguaaaaccgcugaaagacuacucagauuuucagauaaaagacagacagaagaagcgaucgacagaauuuuugcaaucucccaacaacaacaacaacaaucaaaauccaagaaaaacaggagagcaggaaaaagauacaaauucguugacgcaguuccagacauauucgcccaaauagaaguaaaugaaaagaaaauaagacaaaaagcacaaauauuagcacaaaaagaacuuccaauugacgaagaugaagaaaugaaagaccuacuugacuucgccgacguuacauaugaaaaacauaaaaauggcggacuuauaaaaggaagauucggucaagcuagaaugguaacaacaacacauucaagagcacccucauuaucagcuucauauacaagacuuuuccugauuuuaaacauugcaauauucuuuguaaugcuagcaaugcaacuaacauauuuccaaagagcacaaucucuucacggucaaagaugucuauacgccguacuauuaauagauucuugcauacuucucuggcuauauaguucauguucacaaucucaaugcuaa

SEQ ID NO: 3966 - RNA, 2892 nt, Artificial Sequence
  AAH93784 variant
auggcaacagcugcagaaacaagugcuucagaaccagaagccgaaucuaaagcaggaccaaaggcagacggagaagaagaugagguaaaagcggcaagaacaagaaggaaaguucuaaguagggccgucgcagcagcaacauacaaaacaaugggaccagccugggaccaacaagaagaaggaguuuccgagagugauggagaugaauaugcgauggcaucauccgcagaaucuucaccaggugaguaugaaugggaauacgaugaagaggaagagaaaaaucaacuggaaaucgaaagacuugaggaacaacuaagcauaaacguauacgacuauaauugucauguagauuuaaucaggcuauuaaggcucgaaggugaacuuacuaaagugagaauggcaagacagaaaaugucagaaauauucccacuaacagaagaauuguggcuagaauggcuacacgaugaaauuucuauggcacaagauggacuugacagagaacauguauacgaucuguucgaaaaagccguaaaagacuacauaugcccgaacauauggcuagaauauggacaauacucaguaggaggaauaggucaaaaaggaggauuagaaaaaguaagaaguguguuugaaagagcuuuaaguucaguaggauuacauaugacaaaaggucuagcucuaugggaagcauauagagaauuugaaucagcgauaguugaagcugcgaggcuagaaaaaguccauucauuauuuaggagacaauuagcuauaccauuauaugacauggaagcaacauucgcagaauacgaagaauggagugaagacccaauaccagaaucaguaauacaaaauuauaauaaagcguuacaacaacuagaaaaauauaaaccauaugaagaagcauuacuacaagcagaagcgccuagacuugcagaauaccaagcauacauagacuuugaaaugaaaaucggagauccugcucgaauacaauuaauuuuugaaagggcuuuaguugaaaauuguuugguaccagaucuuuggauaagauacagucaauauuuagauagacaauuaaaagucaaagacuuaguucuaucaguacacaaucgugcaauacgaaauugcccguggacaguagcacuauggucaagauaccuauuagcaauggaaagacauggaguagaucaucaaguaauaucaguaaccuuugaaaaagcacugaacgcaggcuuuauucaagcaacagauuaugucgaaauauggcaggcuuaccuggauuaucugagaagaagaguugauuucaaacaagauuccucgaaagaauuagaagaacugagagcugcauuuacuagggcguuagaguaucuaaagcaagaaguagaagagagauuuaaugagaguggugauccaaguuguguaauaaugcaaaauugggcaagaauagaagcacgccuaugcaauaacaugcaaaaagcaagagaacuuugggauucgauaaugacaagaggcaaugcuaaauacgcaaauauguggcuugaauauuauaaucuagagagggcacacggugauacucaacauuguagaaaagcgcuucauagggcaguacaauguacgucagacuauccagaacauguaugugaaguucuacuaaccauggaacggacugaagggaguuuagaggacugggauauagcgguccagaaaacagaaacgagauuggcaagaguaaacgaacaacgcaugaaagcagcagagaaggaagcagcacuuguacaacaagaagaagaaaaagccgaacaaagaaagcgcgcaagggcagaaaagaaagcucuuaaaaagaagaagaaaauaaggggcccggagaaaagaggagcagacgaagaugacgaaaaagaauggggagacgaugaagaggaacaaccaagcaaaagaagaagaguugaaaauucaauaccagcagcuggggaaacacaaaauguagagguugcagcaggaccagcaggaaaaugugcugccguugacguagagccaccaucaaaacagaaagaaaaagcagcauccuuaaaaagagauaugccuaaaguauuacaugacaguucaaaagacaguauaacuguuuuugucaguaaucugccauauucaaugcaagaaccagauacaaaacuaagaccccuauucgaagccuguggagaaguaguacaaauaagaccuauauuuucgaauaggggagacuuuagaggauauugcuauguggaguucaaagaagaaaaauccgcacuacaggcacuagaaauggauaggaaaucuguagaagggcgaccaauguuuguaagcccgugugucgauaaauccaagaacccagauuuuaaaguauuuagauauaguaccagcuuggagaaacacaaauuauuuauaagcggacucccauuuaguuguaccaaagaagaacuagaggaaauaugcaaagcacacggaacagugaaagauuuaaggcuugucacuaacagagcaggaaaaccaaaaggucuggcauacgucgaauacgaaaaugagagucaagccagucaagcagugaugaaaauggauggaaugacuauaaaagaaaacauaauuaaaguagcuauaucaaauccaccacaaaggaaagugcccgagaaaccugaaacacggaaagcgccagguggaccaauguuguuaccacaaacauacggcgcaaggggcaaagggaggacacaauugaguuuacuaccccgcgcauuacagagaccaagugcagcagccccacaagcggaaaaugguccggcggcagcaccagcagucgcggcaccagcugccacagaagcaccuaaaaugaguaaugcagacuuugcaaaacuuuucuugagaaaauaa

SEQ ID NO: 3967 - RNA, 2283 nt, Artificial Sequence
  AAC51668 variant
augaaaacauggguaaaaauaguauucggagucgcaacaucagccguacuagcauuauuaguaauguguauaguacuacgaccaucaagaguacacaacagcgaagaaaauacaaugagagcauuaacauuaaaagacauccuuaauggaaccuucucuuauaaaacauucuuuccaaauuggaucucaggucaagaauauuuacaucaaucagcagacaacaacauaguauuauacaacauagaaaccggucaaucauauacaauccuauccaacagaacaaugaaauccguaaaugcaucgaacuacggucuauccccagauagacaauucguauaccuagaaagcgauuauucaaaacuauggagauacucuuauacagcaaccuauuacauauaugaccuuagcaacggagaguucguacgcgguaaugaauuaccgagaccaauacaauacuuauguuggucuccagucggcucaaaauuagccuacguauaccaaaacaacauauauuuaaaacaaagaccaggugaccccccauuucaaauaacauucaacggacgagaaaauaaaauuuucaacgggauaccagacuggguauaugaagaagaaaugcuugcaacaaaauacgcacuaugguggucaccuaauggaaaauuccuugcauacgccgaauucaaugacacagauauaccaguuauagccuauuccuauuauggagacgaacaauacccacgcacaauaaauaucccauacccaaaagcaggugccaaaaaucccguaguaagaauauuuauuauagacacaacauauccagcauacguuggaccacaagaaguaccgguaccugcuaugaucgcaucaucagacuacuacuucagcugguuaacaugggucaccgacgaacgagucugucuacaauggcuaaaaagaguacaaaauguaagcguacuaucuaucugugauuuucgagaagacuggcaaacaugggauuguccaaaaacacaagaacacauugaagaaucaagaaccggaugggcaggagguuuuuuuguaucaacaccuguuuucagcuacgaugcaaucucuuacuauaaaauauucagcgacaaagaugguuacaaacacauacauuacauaaaagacaccguagaaaacgccauacaaauaacaagcggaaaaugggaagcuauaaacauauuccgaguuacacaagacucacuauucuacaguaguaaugaauuugaagaauacccuggacgacgaaauaucuacagaauaaguaucggcaguuauccuccaucuaaaaaauguguuacuugccauuuacgaaaagaaagaugccaauacuauacagcuucauucuccgauuacgcuaaauauuaugcucucguuuguuacgguccaggaauaccaauaucaacccuccaugacggccgaacagaucaagaaauuaaaauuuuagaagaaaauaaagagcuagaaaaugcacucaaaaauauacaacuaccaaaagaagaaauaaaaaaacuagaaguugacgaaauaacacuaugguacaaaaugauuuuacccccacaauucgacagaucaaaaaaauauccacuacucauacaaguauauggagguccauguagccaaucugucagaucaguauuugcaguuaacuggauaucauacuuagccuccaaagagggaaugguaauagcacugguugacggaagagguacagcauuccaaggagauaaacuauuauacgccguauaccguaaacuaggaguauacgaaguagaagaccaaauaacagcaguucgcaaauuuauugaaaugggcuucauagacgaaaaacggauagcaauuuggggauggucauauggaggauaugucaguucacucgcucuagcaucaggaacaggacuauucaaaugcggaauagcugucgccccaguaucuucaugggaauacuaugcaucaguauauaccgaacgauuuaugggauuacccacuaaagaugacaauuuagaacacuauaaaaacucuacuguaauggcaagggcagaauacuuucgaaacguagauuaucuauuaauacacggcaccgcagacgacaacguacacuuucagaacuccgcacaaauagcuaaagcuuuaguuaacgcacagguugauuuccaagcaaugugguauucagaccaaaaucacggucuaucaggucuaucaacaaaccaccucuacacucauaugacucacuuuuuaaaacaauguuucucacuaagcgacuaa

SEQ ID NO: 3968 - RNA, 1128 nt, Artificial Sequence
  CCDS32839.1 variant
auggacgcccuacaacuugcaaacucggcauuugcagucgaccuauucaaacaacucugcgaaaaagaaccauuaggaaacguccuauucucacccauaugccuaucaacuucucuaucauuagcccaaguaggagccaaaggagacacagcaaacgaaauuggacaaguacuccacuuugaaaacguaaaagacguaccauucggauuccaaacaguaaccucagauguaaacaaacuaucaucauuuuacucacuuaaacucauaaaaagacuauacgucgacaaaucuuuaaaccucucaacagaauuuauaucauccaccaaaagaccauaugcuaaagaacucgaaacaguagacuucaaagacaaauuagaagaaacaaaaggccaaauaaacaacuccauaaaagaccuaacagauggacacuucgaaaacauacucgcagacaauuccguaaacgaccaaacaaaaauacuaguaguaaaugcagcauacuucguaggcaaauggaugaaaaaauucuccgaaucagaaaccaaagaaugucccuuccgaguaaacaaaacagacacaaaaccaguccaaaugaugaauauggaagcaacuuucugcaugggaaacauagacucaauaaauugcaaaauaauagaauuaccauuccaaaauaaacaucuaucaauguucauacuacuccccaaagauguugaagacgaaagcacaggauuagaaaaaauagaaaaacaacuaaauucagaaucccuaucacaauggacaaacccaucaacaauggcaaacgcaaaagucaaauuaucaaucccaaaauucaaagucgaaaaaaugaucgacccuaaagcaugucuagaaaacuuagguuuaaaacacaucuucucagaagauacaucagacuucuccggaaugucugaaaccaaaggaguagcacuaucaaacguaauacacaaaguaugucuugaaauaacagaagacggaggagacucaauagaagucccaggagccagaauacuacaacacaaagacgaauuaaacgcagaucacccauucauauacauaauaagacacaauaaaacuagaaacaucauauucuucggcaaauucuguucaccauaa

SEQ ID NO: 3969 - RNA, 1002 nt, Artificial Sequence
  AAH06564 variant
auggcuuguucaagaccaccaucacaaugcgaacccacaagucuaccaccaggcccaccagcaggaagaagacauuuaccacuaucaagacgaagaagggaaaugaguucuaacaaagaacaaagaucagcaguauucguaauauuauuugcacuaauaacaauacuaauacucuauagcuccaacucagcaaaugaaguauuucacuauggaucacuaagaggacgaucaagacguccaguaaacuuaaaaaaauggagcaucacagauggauacguaccaauacuaggaaacaaaacauuaccaucaagaugucaccaaugcguaauaguaucaucaagcucacaccuauuaggaacaaaacuaggaccagaaauagaaagagcagaauguacaauaagaaugaacgaugcaccaacaacuggauauucagcagacguaggcaauaaaacuacauauagaguugucgcacauucaucaguauucagagucuuacgaagaccccaagaauuuguaaacagaacacccgaaacaguauucauauucuggggcccaccaucaaaaaugcaaaaaccccaaggaucacuaguaagaguaauacaacgcgcagguuuaguauuuccaaauauggaagcauaugcagucagcccagguagaaugagacaauuugacgauuuauuuagaggagaaacaggaaaagacagagaaaaaagccauucauggcuaucaacaggaugguucacaaugguaauagcaguugaauuaugcgaucacguacacguauacggaaugguacccccaaacuauuguucacaacgacccagacuccaaagaaugccauaucacuauuacgaaccaaaaggaccagacgaaugcguuacauauauccaaaacgaacacucuagaaaaggaaaucaccauagauuuauaacagaaaaacgaguauucucaucaugggcucaacuauauggaauaacauuuagccauccaucauggacauaa

SEQ ID NO: 3970 - RNA, 1071 nt, Artificial Sequence
  AAC37586 variant
augucaccuugcggaagagccagaagacaaacauccagaggagcuauggcaguauuagcauggaaauucccacgaacuagauuaccaaugggagcaucagcauuaugcguaguaguauuaugcugguuauacauauuuccaguauacagacuaccaaacgaaaaagaaauaguacaagguguccuacaacaaggaacagcauggagaagaaaucaaaccgcagcaagagcuuucagaaaacaaauggaagacugcugcgaccccgcucauuuauucgcaaugacaaaaaugaacucaccaaugggaaaauccaugugguacgauggagaauuccuauacuccuuuacaauagauaacucaacauacucacuauuuccacaagcaaccccauuccaacuaccccuaaaaaaaugcgccguaguuggaaauggcggaauucucaaaaaaucaggaugcggaagacaaauagaugaagcaaacuucgucaugagaugcaacuuaccaccacuauccucagaauacacaaaagauguaggaucaaaaucacaauuaguaacagcaaaccccucaauaauaagacaaagauuccaaaaccuacuauggucaagaaaaacauuugucgacaacaugaaaauauacaaccacucauauauauauaugccagcauucucaaugaaaacaggaacugaaccaucacuuagaguauacuacacauuaucagacguaggcgcaaaucaaacaguacuauucgcaaauccaaacuuccuaagaucuauaggcaaauucuggaaaucaagaggaauacaugcuaaaagauuaucaacuggccuauuccuaguaucagccgcacuuggauuaugcgaagaaguagcaauauacggauuuuggccuuuuuccguaaacaugcacgaacaaccaauaucacaccacuacuacgacaacguacuacccuuuucaggauuccacgccaugccagaagaauuccuacaacuuugguauuuacauaaaaucggagcacucagaaugcaauuagaccccugcgaagacacaucauuacaaccaacaucauaa

SEQ ID NO: 3971 - RNA, 1257 nt, Artificial Sequence
  BAG50894 variant
augcgaaccaaagcagcaggaugcgcagaacgaagaccacuacaaccacgaacagaagcagccgcagccccagccggaagagcaaugccaagugaauauacguacgucaaauuacgcucagacugcaguagaccaagcuuacaaugguacacaagagcacaaucaaaaaugagacgaccaagucuauuacuaaaagacauauuaaaauguacccuacucguauucggcguauggaucuuauacauacucaaacuaaauuauacaacagaagaaugugacaugaaaaaaaugcacuacguagauccagaccacguaaaaagagcacaaaaauacgcccaacagguacuacaaaaagaauguagaccaaaauucgcaaaaacaagcauggcacuccuauucgaacacagauacucaguagaucuuuuaccauucguacaaaaagcacccaaagacucagaagcagaauccaaauacgauccacccuucggauucagaaaauucucaucaaaaguacaaacucuauuagagcuacuacccgaacaugauuuaccagaacauuuaaaagcaaaaacuugcagaagauguguaguaauaggcucaggagggauauuacauggacuagaauuaggacacacacuaaaucaauucgacgucguuauacgauuaaauucagccccaguagaaggauacucagaacauguaggaaacaaaacaacaauaagaaugacauacccagaaggagcuccacuaucagaccuagaauacuacucuaacgaccuauuuguugccguacuauucaaaucugucgauuucaauugguugcaagcaaugguaaaaaaagaaacauuaccauucuggguaagacuauuuuuuuggaaacaaguagcagaaaaaaucccacuacaacccaaacacuuuagaauauuaaacccaguuauaauaaaagaaacagcauucgauauacuacaauacagugaaccccaaucaagauuuuggggaagagacaaaaacguaccaacgauuggagucauagcaguaguauuagcaacacacuuaugugacgaagucagucuugccgguuucggguaugaucuaaaccaaccacgaacaccacuacauuauuucgacucacaauguauggcagcaaugaacuuccaaacaaugcauaacguuacaacagaaacuaaauuuuuacuaaaacuuguaaaagaaggugucguaaaagaccuaagcggaggaauagacagagaauucuaa

SEQ ID NO: 3972 - RNA, 1059 nt, Artificial Sequence
  EAW56837 variant
auggauuuccuaagaaaucucuuuucacaaacacucucacuaggaagucaaaaagaaagauuauuagacgaauuaaccuuagaaggaguugcaagauauaugcaaucagaaagauguagaagaguaauaugccuagucggugcaggaauaucaacaucagcaggaauaccggacuucagaucaccaucaacaggacucuacgacaaccuagaaaaauaucacuuaccauaucccgaagcaauauuugaaauaucauacuucaaaaaacacccagaacccuuuuucgcauuagccaaagaauuauacccaggucaauuuaaaccaacaauaugucacuacuuuaugagauuauuaaaagacaaaggcuuacuucuaagauguuauacgcaaaacauagacacuuuagaaagaauagcaggauuagaacaagaagacuuaguagaagcacacggaacuuucuacacaucacacugcguaucagcaucuugccgacaugaauacccacuauccuggaugaaagaaaaaauauucucagaaguaacacccaaaugcgaagacugccaaucauuaguaaaacccgacauaguauucuucggagaaucauuaccggcaagauucuucucaugcaugcaaagcgacuuccuaaaaguagaccuacuacuuguaaugggaacuagcuuacaaguacaacccuucgccuccuuaauuucaaaagcaccauuaucaacaccaagauuauuaauaaacaaagaaaaagcaggacaaucagacccauucuuagggaugauaaugggacuaggagguggcauggacuucgacucaaaaaaagcauacagagacgucgcauggcuaggagaaugugaccaaggauguuuagcacuugcagaacucuuagguuggaaaaaagaauuagaagaccuaguaagaagagaacaugcaucaauagaugcacagucaggagcaggaguaccaaauccaucaacaucagcauccccaaaaaaaucaccaccaccagcaaaagacgaagcaagaacaacagaaagagaaaaaccacaauaa

SEQ ID NO: 3973 - RNA, 1170 nt, Artificial Sequence
  AAD40850 variant
auggcagaaccagaccccagccauccauuagaaacacaagcagguaaaguacaagaagcacaagacucagauucagauagugaaggaggagccgcaggaggagaagccgacauggauuuucuaaggaaucuauucucacaaacacuaagccuagguucacaaaaagaacgacuacuugacgaauuaacacuagaaggaguagcaagauauaugcaaucagaacgaugcagaagaguaauaugcuuaguaggugccgguauaucaacaucagcaggcauuccagacuuucgaucuccaucaacaggacuauaugacaaucuagaaaaauaucaccuaccauauccagaagcaauauucgaaauaucauauuuuaaaaaacacccagaaccauuuuucgcacuagccaaagaauuauaccccggacaauuuaaaccaacaauaugucauuacuuuaugcgacucuuaaaagacaaaggacuacuacuaagauguuauacacaaaauauagacacacuagaaagaauagccggauuagaacaagaagauuuaguagaagcacauggaacauuuuacacaagccauugcguaagugcaucaugcagacaugaauauccauuaagcuggaugaaagaaaaaaucuucagcgagguuaccccaaaaugugaagacugccaaucacuaguaaaacccgauauagucuuuuucggcgaaucacuaccagcuagauucuucucauguaugcaaucagauuucuuaaaaguagaccuucuauuagucaugggaacaagucuacaaguacaaccauucgcaagccuaauaaguaaagcaccauuaucaacaccaagacuacuaauaaauaaagaaaaagcaggacaaagugacccauucuuaggaaugauuaugggacuuggagguggaauggauuuugauucaaaaaaagcauacagagauguagcauggcuaggagaaugugaccaaggaugcuuagcauuagcagaacuacuaggcuggaaaaaagaacucgaagauuuaguaagaagagaacacgcauccauagacgcacaaucuggagcaggaguuccaaaucccucaacaucagcaucaccuaaaaaauccccaccaccagcuaaagaugaagcaagaacuacagaaagagaaaaaccacaauaa

SEQ ID NO: 3974 - RNA, 1401 nt, Artificial Sequence
  AAH02824 variant
auggcagaagaacaagaucuaucugaaguagaauuaucaccaguaggaucagaagaaccaagaugucuauccccaggaucagcaccaucacuaggaccagauggcggaggagguggaucgggacuaagagcuucaccaggaccaggcgaacuaggaaaaguuaaaaaagaacaacaagauggagaagcugaugaugauaaauuuccaguaugcauaagagaagcaguaagccaaguguuaucagguuacgauuggacgcuaguuccgaugccaguaagaguaaacggcgcuucuaaaaguaaaccucacguaaagagaccaaugaacgccuucaugguaugggcacaagcagcaagaagaaaacuagcagaucaauauccacaccuucauaaugcagaacuaucaaaaacauuaggaaaauuauggagauuauuaaaugaaucagacaaaagaccauucauagaagaagcugaacgauuaagaaugcaacauaaaaaggaccacccagauuauaaauaucaaccaagaagaagaaaaaacggaaaagcagcacaaggagaagcugaauguccuggaggagaagcagaacaagguggaacagccgcaauacaagcacacuacaaaagcgcacacuuagaccacagacauccaggagaaggaaguccuaugucagacgguaacccagaacauccuucaggacaaucacauggaccucccacaccuccaacaacaccaaaaacagaauuacaaaguggaaaagcagacccaaaaagagacggaagaucaaugggagaaggaggaaaaccucacauagauuuugguaacguagauauaggagaaauaucccacgaaguaaugucaaauauggaaacauuugacguggcagaacuagaccaauaucucccaccaaauggucacccaggacauguaucaaguuauucagcagcuggauacggauuaggaagugcacuugcaguagcgucaggacauucagcauggauuucuaaaccaccagguguagcauuaccaacaguaucaccgccaggcguugaugcaaaagcacaaguaaaaacagaaacagcuggcccacaaggcccaccucauuacacagaucaaccaaguacuagucaaauagcauauacaucauuaucauuaccacauuacggaucagcauuuccaucaauaucaagaccacaauucgauuacucugaucaucaaccaucaggaccauacuacggacauucuggacaagcuucaggucucuacucagcauucucuuacaugggaccaucacaaagaccucucuauacagccauauccgacccaucaccaagcggaccccaaucacauuccccaacacacugggaacaaccaguuuauacaacacuaaguagaccauaa

SEQ ID NO: 3975 - RNA, 456 nt, Artificial Sequence
  AAH32457 variant
augucaauaccauucucaaacacacacuacagaauaccacaaggauucggaaaccuacuagaaggacuaacaagagaaauacuaagagaacaaccagacaacauaccagcauucgcagcagcauacuucgaaagccuacuagaaaaaagagaaaaaacaaacuucgacccagcagaauggggaucaaaaguagaagacagauucuacaacaaccacgcauucgaagaacaagaaccaccagaaaaaucagacccaaaacaagaagaaucacaaauaagcggaaaagaagaagaaacaucaguaacaauacuagacucaucagaagaagacaaagaaaaagaagaaguagcagcaguaaaaauacaagcagcauucagaggacacauagcaagagaagaagcaaaaaaaaugaaaacaaacucacuacaaaacgaagaaaaagaagaaaacaaauaa

SEQ ID NO: 3976 - RNA, 294 nt, Artificial Sequence
  AAF28420 variant
auggacaaacaaagcucagcaggaggaguaaaaagaagcguaccaugcgacucaaacgaagcaaacgaaaugaugccagaaacaccaacaggagacagcgacccacaaccagcaccaaaaaaaaugaaaacaagcgaaagcucaacaauacuaguaguaagauacagaagaaacuucaaaagaacaagcccagaagaacuauuaaacgaccacgcaagagaaaacagaauaaacccacuacaaauggaagaagaagaauucauggaaauaaugguagaaauaccagcaaaauaa

SEQ ID NO: 3977 - RNA, 426 nt, Artificial Sequence
  AAH62750 variant
auggaacaaccaacaucaucaacaaacggagaaaaaacaaaaagcccaugcgaaucaaacaacaaaaaaaacgacgaaaugcaagaaguaccaaacagaguacuagcaccagaacaaucacuaaaaaaaacaaaaacaagcgaauacccaauaauauucguauacuaccuaagaaaaggaaaaaaaauaaacagcaaccaacuagaaaacgaacaaucacaagaaaacagcauaaacccaauacaaaaagaagaagacgaaggaguagaccuaucagaaggaucaucaaacgaagacgaagaccuaggaccaugcgaaggaccaagcaaagaagacaaagaccuagacagcucagaaggaucaucacaagaagacgaagaccuaggacuaucagaaggaagcagccaagacucaggagaagacuaa

SEQ ID NO: 3978 - RNA, 567 nt, Artificial Sequence
  AAH01003 variant
augaacggagacgacaccuucgcaaaaagaccaagagacgacgcuaaagcaucagaaaaaagaucaaaagcauucgacgacauagcaacauacuucucaaaaaaagaauggaaaaaaaugaaauacucagaaaaaauaucauacguauacaugaaaagaaacuacaaagccaugacaaaacuaggauuuaaaguaacacuaccaccauucaugugcaacaaacaagcaacagacuuccaaggaaacgacuucgacaacgaccacaacagaagaauacaaguagaacacccacaaaugacauucggaagacuacacagaauaauaccaaaaauaaugccaaaaaaaccagcagaagacgaaaacgacagcaaaggaguaucagaagcaucaggaccacaaaacgacggaaaacaacuacacccaccaggaaaagcaaauaucucagaaaaaauaaacaaaagaucaggaccaaaaagaggaaaacacgcauggacacacagacuaagagaaagaaaacaacuaguaauauacgaagaaauaucagacccagaagaagacgacgaauaa

SEQ ID NO: 3979 - RNA, 567 nt, Artificial Sequence
  AAH16957 variant
augaacggagacgaugcauucgcaagaagaccaacaguaggagcacaaauaccagaaaaaauacaaaaagcauucgacgacauagcaaaauacuucucaaaagaagaaugggaaaaaaugaaagcaucagaaaaaaucuucuacguauacaugaaaagaaaauacgaagcaaugacaaaauuaggauucaaagcaacacuaccaccauucaugugcaacaaaagagccgaagacuuccaaggaaacgacuuagacaacgacccaaacaggggaaaccaaguagaaagaccacaaaugacauucggaagacuacaaggaauaucaccaaaaauaaugccaaaaaaaccagcagaagaaggaaacgacagcgaagaagucccagaagcaucaggaccacaaaacgacggaaaagaacuaugcccaccaggaaaaccaacaacaucagaaaaaauacacgaaagaagcggcccaaaacgaggagaacacgcauggacacacagauuaagagaaagaaaacaacuaguaauauacgaagaaauaucagacccugaagaagacgacgaauaa

SEQ ID NO: 3980 - RNA, 567 nt, Artificial Sequence
  AAC05819 variant
augaacggagacgacacauucgcaagaagaccaacaguaggagcacaaauaccagaaaaaauacaaaaagcauucgacgacauagcaaaauacuucucaaaagaagaaugggaaaaaaugaaaguaucagaaaaaauaguauacguauacaugaaaagaaaauacgaagcaaugacaaaacuaggauuuaaagcaauacuaccaagcuucaugagaaacaaaagaguaacagacuuccaaggaaacgacuucgauaacgacccaaacagaggaaaccaaguacaaagaccacaaaugacauucggaagacuacaaggaauauucccaaaaauaaugccaaaaaaaccagcagaagaaggaaacguaucaaaagaaguaccagaagcaagcggaccacaaaacgacggaaaacaacuaugcccaccaggaaaaccaacaacaagcgaaaaaauaaacaugauaucaggaccaaaaagaggagaacacgcauggacacaccgacuaagagaaagaaaacaacuaguaauauacgaagaaauaagcgacccagaagaagacgacgaauaa

SEQ ID NO: 3981 - RNA, 567 nt, Artificial Sequence
  AAC05820 variant
augaacggagaugacgcauucgccaggagaccaagagacgacgcacaaauaagcgaaaaacuaagaaaagcauucgacgacauagcaaaauacuuuucaaaaaaagaaugggaaaaaaugaaaagcucagaaaaaauaguauacguauacaugaaacuaaacuacgaaguaaugacaaaacuaggauucaaaguaacacuaccaccauucaugagaucaaaaagagcagcagacuuccacggaaacgacuucggaaacgacagaaaccacagaaaccaaguagaaagaccacaaaugacauucggcucacuacaaagaauauucccaaaaauaaugccaaaaaaaccagcagaagaagaaaacggacuaaaagaaguaccagaagcaucaggaccacaaaacgacggaaaacaacuaugcccaccaggaaacccaagcacacuagaaaaaauaaacaaaacaucaggaccaaaaagaggaaaacacgcauggacacacagacuaagagaaagaaaacaauuaguaguauacgaagaaauaucagacccagaagaagacgacgaauaa

SEQ ID NO: 3982 - RNA, 888 nt, Artificial Sequence
  CCDS32420.1 variant
auggaacuaauacaagacacaucaagaccaccacuagaauacguaaaaggaguaccccuaauaaaauacuuugcagaagcauuaggaccauuacaaucauuccaagcaagaccagacgacuuauuaauaucaacauacccaaaaucaggaacaacauggguaucacaaauauuagacaugauauaccaaggaggagaccuagaaaaaugucaccgagcaccaauauucaugcgaguaccauuccuugaauuuaaagcaccgggaauaccaucaggaauggaaacauuaaaagacacaccagcaccaagacuauuaaaaacacaucuacccuuagcacuauuaccacaaacacuccuagaccaaaaaguaaaagucgucuacguagcaagaaacgcaaaagacguagcaguaaguuacuaucacuucuaucauauggcaaaaguccacccagaaccaggaaccugggacucauuccuagaaaaauucaugguaggagaaguaucauacggaucaugguaucaacacguacaagaauggugggaauuaucacgaacacaccccguacuauaucuauucuacgaagacaugaaagaaaacccaaaacgcgaaauacaaaaaauacuagaauucguaggcagaagucuaccagaagaaaccguagauuucguaguccaacacacaagcuucaaagaaaugaaaaaaaacccaaugacaaacuauacaacaguaccacaagaauucauggaccacaguauaucaccauucaugagaaaaggaauggcaggagacuggaaaaccacauucacaguagcacaaaacgaaagauucgacgcagacuacgcagaaaaaauggcaggaugcagcuuaucauucagaucagaacuauaa

SEQ ID NO: 3983 - RNA, 3807 nt, Artificial Sequence
  CCDS43990.1 variant
augauagcagcaccugaaauucccacagauuuuaauuuacuacaagaaucagagacucauuuuuccagugacacggauuuugaagacauagaaggaaagaaucaaaaacaaggaaaaggaaaaaccuguaagaaaggcaagaaaggaccagccgaaaaaggaaaaggcgguaacggcggaggaaaacccccaucuggaccuaaucgaaugaacggacaucaccaacagaacggagucgagaauaugauguuguuugaagucguaaaaaugggaaaaagcgccaugcaaucuguagucgaugacuggauagaaucguacaaacaugauagggauaucgcuuuauuagauuuaauaaacuuuuucauacaauguagcggauguaaaggcguaguaacagccgaaauguuuaggcacaugcaaaauagugaaauuauuagaaaaaugaccgaggaauuugacgaagauagcggagauuauccucuaaccauggcugggccacaauggaagaaauuuaaaucaucauuuugugaauuuauaggaguccuaguaagacaaugucaauacagcauuauauacgacgaauacaugauggauacaguuauaucuuuauugacgggccuaucggauucacaaguucgugccuuuagacacacaucuacacuugcagcaaugaaauuaaugacggccuuagucaacguagcauuaaacuuaucgaucaauauggauaauacacaaagacaauaugaagccgaaaggaacaaaaugauaggcaaaagagcaaaugaaagacuagaacuucuauuacagaaaagaaaagaacuucaagagaaccaagaugagauagagaauaugaugaacgcaaucuucaaaggaguauuuguacauagauacagagacgcaauugccgagauacgcgcaauuugcauugaagaaauuggcauauggaugaaaauguauuccgacgcauuccuaaacgacucguaucuaaaauauguaggcuggaccaugcacgacaagcaaggagaaguaagacuaaaauguuuaacagcauuacaagguuuauacuauaacaaagaauugaacucaaaacuugaacuauuuacaucaagauucaaggacagaaucguuaguaugaccuuagacaaggaauaugacguagcaguacaagcuauaaaauuacugacccuaguuuuacaaucuagcgaagaaguacucacagcggaagauugugaaaacgucuaucauuuaguauacagugcacauagacccguagcaguagcagccggagaguuccuauauaagaaauuauucucacgaagagaccccgaagaagauggaaugaugaaaagaaggggccgucaaggaccgaacgcaaaccuaguaaaaacauuaguauuuuucuuccuugaauccgaacugcacgaacacgcugcauauuuaguagauaguaugugggacugcgcaacagaacuacuuaaagacugggaaugcaugaacaguuuacuauuagaagaaccauuaaguggagaagaagcacucaccgacaggcaagaaucagcucuaauagaaauaaugcuaugcacuauaagacaagcagccgaaugucauccuccgguaggaagagggacgggaaaaaggguacucacggccaaagaaaagaaaacacaacuugaugauagaaccaaaauuacagaguuauuugcaguagcucuaccucaacuuuuagcaaaauauuccguggacgcagaaaaaguuacaaaucuacuacaacuuccacaauacuuugaucuagaaauuuauacaacaggccgcuuagaaaaacaucucgacgcacuucucagacaaauuagaaauaucgucgaaaaacauacagacaccgauguauuagaggcuuguaguaaaaccuaccacgcuuuauguaaugaagaauuuacaauauuuaaccguguagacauaucaagaagccaacuaauugaugaguuagcugauaaauuuaauagauuacuagaagacuucuuacaagaaggagaagaaccagaugaagacgacgccuaucaaguacuuaguacccucaagagaauaaccgcuuuccacaacgcacaugacuuaucaaaaugggacuuauuugcuugcaacuacaaauuauugaagacaggaauagaaaauggagauaugccugaacaaauugugauacacgccuugcaaugcacucauuacgugauccucuggcaauuggcuaaaauuacagaauccaguucaacuaaggaggacuuacuaagauuaaagaaacaaaugagaguauucugccaaauuugccaacacuaccuaacgaacguaaauacaacagucaaggaacaggcauucacuauacuaugcgauauccuaaugauauuuucacaucaaauuaugucaggugguagagauauguuagaaccacuugucuacacuccagauuccucacuucaaagcgaguuacuuucauuuauuuuagaucauguauucauugaacaagaugacgacaauaacagugcugacggacaacaagaagacgaagcuagcaaaauagaggcuuuacacaagcggagaaacuuacuagcagcauuuuguaaacuuauaguuuacacaguuguggaaaugaauacugcagcugauauuuuuaagcaauauaugaaauacuauaaugauuacggcgauauaauaaaagaaacuaugaguaagacuagacaaauugacaaaauccaaugugcaaagacacuuauacuuucuuugcaacaacuauuuaaugaaaugauccaagagaaugguuauaauuuugaucgaagcucaucuaccuucucugguauuaaagaacucgcacgaagauuugcacugacauuuggccuugaucaacuuaaaacuagagaagcaauagcaaugcuccacaaagauggcauagaauuugccuucaaagaacccaacccccaaggggaaucacaucccccauuaaaucuggcauuuuuagauauuuuaucagaauuuaguaguaaacuacuuagacaagauaaacgaacagucuacguauaccucgaaaaauucaugacauuccaaaugucucuacggagagaagauguaugguuaccguugaugucuuaccguaacagcuuacuugcgggaggcgacgaugacacaaugaguguaauaucuggaaucucaucaagaggaucaacaguaagaagcaagaaaaguaaaccgaguacuggaaaaagaaaaguaguggaaggaaugcagcuuagccuaacagaagaauccuccucuagcgacaguaugugguuaucaagagaacaaacgcuucauacaccaguaaugaugcaaaccccacaacucacaaguaccauuaugagagagccaaaaagauuacgaccugaagauagcuuuaugucaguuuauccuaugcaaacugaacaucaucaaacaccuuuagauuauaacacucaaguaacauggaugcuagcacaaagacaacaagaagaagcaagacaacaacaagaaagagcagcuaugucuuacgugaaauuaaggacaaaccuacagcacgcgauuagaagagguaccucacuuauggaagaugacgaggagccuauuguggaggacguuaugauguccuccgaaggccguauugaagaccucaacgaaggaauggauuucgacacaauggauauagauuuaccaccaaguaaaaauagaagagaaagaacagagcuuaaacccgauuucuuugacccagcaucaauaauggacgaaaguguauuagguguuucuauguuuuaa

SEQ ID NO: 3984 - RNA, 1473 nt, Artificial Sequence
  CCDS5615.1 variant
auggaaaguauaucaaugaugggaucaccaaaaucuuuaucagaaacauucuuacccaacggaauaaacggaauaaaagacgcaagaaaaguaacaguaggcgucauuggaucaggugauuucgccaaaucacucacuauaagacuaauuagaugcggauaccacguagucauagguucaagaaaucccaaauuugcaucagaauucuucccccacgucguagauguaacacaccacgaagacgcccuaacaaaaaccaacauaauauucguugccauacaucgagaacauuacaccucccucugggaccuacgacaccuacuaguaggcaaaauacuaauugacguauccaacaacaugagaauaaaucaauacccagaauccaacgcagaauaccuagcaucacucuuucccgacucauuaauaguaaaaggauuuaauguaguaucagcaugggcauuacaauuagggcccaaagaugcaucccgacaaguauacauaugcucaaauaauauacaagcuagacaacaagucauagaacuagcaagacaauuaaacuucauaccaauagaccuaggaucacuauccagugcccgagaaauagaaaaucuccccuuacgacucuucacacucuggagaggcccagucguuguagcaauaucauuagcaacuuuuuuuuuccuauacucauuuguaagagacgucauacacccauacgcuagaaaucaacaaucagacuucuacaaaauuccaaucgaaaucguaaacaaaacacuaccaaucguagcaauaacccuauuaucauuaguauacuuagcaggauuacuagcagcagcuuaucaacuauacuaugguaccaaauauagaagauucccaccauggcuagaaacauggcuucaauguagaaaacaauuaggauuacuauccuucuucuucgcaaugguacacgucgcuuacucucuuugucuaccaaugagacgaucagaaagauaccuauuuuuaaacauggccuaucaacaaguacacgcaaacauagaaaauucauggaacgaagaagaaguauggcgaaucgaaauguacauaucuuucggaauuaugucacuaggacuacuuucccugcucgcuguaacaucaauuccaucagucuccaacgcccuaaauuggcgagaauucucauuuauccaaucaacauuagguuacguagcauuacuaauaucuacauuccacguacuaauauauggauggaaaagagcauuugaagaagaauacuacagauucuacacuccccccaacuucguacuagcacuaguuuuaccauccaucguaauacuaggcaaaauaauauuauuucucccaugcaucucacgcaaauuaaaaagaaucaaaaaaggcugggaaaaaucucaauuucuagaagaaggcaugggaggaacaauaccccacguaucuccagaaagaguaacuguaauguaa

SEQ ID NO: 3985 - RNA, 777 nt, Artificial Sequence
  EAW93749 variant
auggaaucacgaaaagauauaacaaaucaagaagaaauauggaaaaugaaacccagaagaaaccuagaagauaacgacuacuuacacaaagauaccggagaaacaucaauguuaaaacgaccaguacuacuacaccuacaacaaacagcacacgccgacgaauucgacugcccaucagaacuacaacacgcacaagaacuauuuccacaauggcaccuaccaauaaaaaucgcagcaguaauggcaucauuaacauucuuauacacacuacuaagagaaguaauacacccacuagcaacaucacaccaacaauacuucuacaaaauaccaauacuaguaauaaacaaaguauuaccaaugguaucaauaacacuacuagcacuaguauaucuaccaggcguaauagcagcaauaguacaaguacacaauggcacaaaauacaaaaaauucccucacuggcuagacaaauggauguuaaccagaaaacaauuuggacuacuaucacuauucuucgcaguacuacacgccauauacacauuaucauaugcaaugagaagaucuuacagauauaaacuacuaaacugggcauaccaacaaguacaacaaaacaaagaagacgcauggauagaacacgacguauggagaauggaaauuuacguaucacuaggcauaguaggauuagcaauacucgcacuauuagccgucacaucaauaccauccguaucagacucacuaacauggcgagaauuucacuacauacaaguaaauaacauauaa

SEQ ID NO: 3986 - RNA, 1020 nt, Artificial Sequence
  AAD15620 variant
auggaaucaagaaaagauauaaccaaccaagaagaacucuggaaaaugaaaccuagacgaaaccuagaagaagacgauuacuuacacaaagacacaggagaaacuucaaugcucaaaagaccaguacuucuccaccuacaccaaacagcacaugcagaugaauucgacugucccucagaacuacaacauacacaagaacuauucccacaauggcauuuacccauaaaaauagcagcaauuauagcaucacuaacauuccuauacacccuuuuaagagaagucauacacccccuugcaaccucccaccaacaauacuuuuacaaaauaccaauauuaguaauaaacaaaguacuacccaugguaucuaucacacuauuagcuuuaguauaccuacccggcgucaucgccgcuauaguacaacuccacaauggaaccaaauacaaaaaauucccucacugguuagacaaauggaugcuaacaagaaaacaauucggauuacuaucauucuuuuucgcaguccuucacgccauauacucacuauccuacccaaugcgucgaucauauagauacaaacuacuaaauugggcauaccaacaaguacaacaaaauaaagaagacgcauggauagaacacgauguauggcgcauggaaauauacguaucauuaggaaucguaggacuagccauacuagccuuauuagcaguaacaucaauacccucuguauccgacuccuuaacuuggagagaauuccacuacauacaaucaaaauuaggaaucguaucucuuuuacuaggaacaauacacgcauuaauauuugcauggaacaaauggauagacauaaaacaauucguaugguacacaccacccacauucaugauagcaguauuccuaccaauaguaguccuaauauucaaaucaauacuauuccuaccaugccuaagaaaaaaaauacuaaaaauacgccacggaugggaagacgucacaaaaauaaauaaaaccgaaauaugcucccaauuauaa

SEQ ID NO: 3987 - RNA, 498 nt, Artificial Sequence
  CCDS32752.1 variant
augggagcaccaacacuaccaccagcauggcaaccauuccuaaaagaccacagaauaucaacauucaaaaacuggccauuccuagaaggaugcgcaugcacaccagaaagaauggcagaagccggauucauacacugcccaacagaaaacgaaccagacuuagcacaaugcuuuuucugcuucaaagaauuagaaggaugggaaccagacgacgacccaauaggaccaggaacaguagcauacgcaugcaacacaucaacauuaggaggaagaggaggaagaauaacaagagaagaacacaaaaaacacucaucaggaugcgcauuccuaucaguaaaaaaacaauucgaagaauuaacacuaggagaauuccuaaaacuagacagagaaagagcaaaaaacaaaauagcaaaagaaacaaacaacaaaaaaaaagaauucgaagaaacagcagaaaaaguaagaagagcaauagaacaacuagcagcaauggauuaa

SEQ ID NO: 3988 - RNA, 429 nt, Artificial Sequence
  AAC51660 variant
augggagcaccaacacuaccaccagcauggcaaccauuccuaaaagaccacagaauaagcacauucaaaaacuggccauuccuagaaggaugcgcaugcacaccagaaagaauggcagaagcaggauucauacacugcccaacagaaaacgaaccagaccuagcacaaugcuucuucugcuucaaagaacuagaaggaugggaaccagacgacgacccaauagaagaacacaaaaaacacucaagcggaugcgcauuccuaagcguaaaaaaacaauucgaagaacuaacacuaggagaauuccuaaaacuagacagagaaagagcaaaaaacaaaauagcaaaagaaacaaacaauaaaaaaaaagaauucgaagaaacagcaaaaaaaguaagaagagcaauagaacaauuagcagcaauggacuaa

SEQ ID NO: 3989 - RNA, 2931 nt, Artificial Sequence
  EAW56623 variant
auggaaaaacaaaaaccauucgcgcuuuuuguucccccaaggucaaguucaagccaaguaucagcaguaaaaccucaaacccuaggaggagauaguaccuuuuucaaaucuuuuaauaaauguacagaagaugauuuugaauuccccuuugcaaagacaaaccuaucaaaaaacggggaaaauauagauucugauccugccuuacagaaaguuaacuuccucccaguauuagagcaggucggaaacagugauugccauuaucaagaaggauuaaaagacagugaccuugagaacucggaaggauuaucaagagucuacucaaaacuauacaaagaagccgaaaaaauaaaaaaauggaaaguaucaacggaagcagaauuaagacaaaaagaaagcaaauuacaggaaaacagaaaaauaauagaagcacaacgaaaagcgauacaagaauuacaauucggcaacgaaaaagucucacuaaaguuagaagaaggaauacaagaaaauaaagaucucauaaaagaaaacaacgcuacaagacaccuaugcaacuuacugaaagaaaccugugcgcgaucagccgaaaaaacaaaaaaauaugaauaugaaagagaggaaaccagacaagucuacauggauuuaaauaauaauaucgaaaaaaugaucaccgcauucgaagaacuacgaguacaagcugaaaauagcagacucgaaaugcacuucaaacuaaaagaagacuaugaaaagauacagcaccuggaacaagaauacaaaaaagagauaaaugacaaagaaaaacagguaagucuauuacuaauacaaauaacagaaaaagaaaauaaaaugaaagacuuaacguuccuccuagaagaaucccgugacaaggugaaucaacuagaagaaaaaacaaaacuucaaagugaaaaccucaaacagaguauagaaaaacaacaucaucugacuaaggaauuagaagacauaaaagucagccuccaaaggucuguaaguacacaaaaagcccuagaagaagacuuacagaucgcaacuaaaacuauaugucaacuaacagaagagaaagaaacacaaauggaagaaucaaauaaagcucgagcagcacacucauuuguagucacagaauucgaaacgaccguauguagccucgaagaacuucuaagaaccgaacaacaaagauuggaaaaaaacgaagaucaauuaaagauucuaacgauggagcuacaaaaaaaaaguagugaacuggaagaaaugacaaaacuaacgaauaacaaagagguagagcuagaagaacuaaaaaaaguacuaggagaaaaagaaacacuacuauaugaaaacaaacaauuugaaaaaauagcugaagaacuaaaaggcacagaacaagagcucauaggcuuauuacaagcccgagaaaaggaaguucacgaccuugaaauccaacucacagcaauaaccacaagugaacaauauuacucaaaagaagucaaggaccucaaaacagagcuagaaaacgagaaauuaaaaaacacagaacuaacaagccauugcaauaaacuuagucuagaaaauaaagagcucacucaagaaaccuccgauaugacgcuagaauuaaaaaaucaacaagaggacauaaacaauaauaaaaaacaagaagaacgaauguuaaagcaaaucgaaaaccugcaagaaacagaaacacaacugcgaaaugaacuugaauacguaagggaagaacuaaaacaaaaaagagaugaaguaaaaugcaaauuggacaaaagugaagagaacuguaacaaccuacgaaaacaaguagaaaauaaaaauaaauauaucgaggaauuacaacaagaaaauaaagcguugaaaaaaaaaggaaccgcagaaagcaaacaacuuaacguguacgaaauaaaaguaaacaaauuagaacuagaacuagaaucagcaaaacagaaauucggcgaaauaacagacacauaucaaaaagaaauagaagacaaaaaaauaucagaagaaaacuuacucgaagaaguagaaaaagcuaaagugaucgcagaugaagcaguuaagcuacaaaaagaaauagacaaaagaugccagcauaaaauagcagaaaugguagcccugauggaaaaacauaaacaccaauaugacaaaauuaucgaagagcgagauagcgaauuaggacuguacaaauccaaagaacaagaacaaagcucacuacgcgcuucacuggaaauagaacuaagcaacuuaaaagccgaacuucucagcgucaaaaaacaauuagaaaucgaaagagaagaaaaagaaaaauuaaaaagggaagcaaaagaaaacaccgcaacacuaaaagaaaaaaaagacaaaaaaacccaaacguucuuauuagagacaccagagaucuacuggaaacucgacagcaaagccguacccagccaaacuguaucaagaaacuucacaucuguugaccauggaauaagcaaggacaaaagagacuauuuauggacaagcgccaaaaauacucucagcacaccccucccaaaagcauauacaguaaaaacaccuacuaagccuaaacuccaacaaagggaaaaccuaaacauaccaauagaggaauccaaaaagaaaagaaagauggcauucgaauuugacaucaacucagauucauccgaaacaaccgaccuacuaucaaugguaucagaagaagaaacucucaaaacacuguaccgaaacaauaaccccccagcaucacauuugugugugaaaacacccaagaaggccccuucaucacuaacgaccccaggaucaacacuaaaauucggagcaauacgaaagaugcgcgaagaccgaugggcuguaauagccaaaauggacagaaaaaaaaaauuaaaagaagcagaaaaguuauuugucuaa

SEQ ID NO: 3990 - RNA, 2931 nt, Artificial Sequence
  AAI44020 variant
auggaaaaacaaaaaccauuugcgcuuuuuguacccccucgaaguaguucaagccaaguaucugcugugaaaccacaaacccuaggcggagacucgacauucuuuaaaaguuuuaacaaaugcacagaagaugauuucgaguucccauuugcgaaaaccaaccuaagcaaaaauggugaaaauauagauagcgauccagcacuucaaaaaguaaauuuucuaccaguauucgaacaaguagggaacucagacugccacuaccaagaaggauuaaaagacagugauuuagaaaacuccgaagguuuaagcagaguuuacagcaaacuauacaaagaagccgagaaaaucaagaaauggaaaguaaguaccgaagcggaacugagacagaaagaaucgaaauuacaagaaaauaggaaaauaauagaagcacaacgaaaagcgauccaagaacuacaauuuggaaaugaaaaaguaucauuaaaauuagaagaaggcauacaagaaaacaaagaucugaucaaagaaaacaaugcaacccgacaucuaugcaaucuacuuaaagaaacaugcgcuagaucagcagagaaaaccaagaaauacgaauacgaaagagaagaaacaagacaagucuauauggacuuaaacuccaauauugagaaaaugauuacagcauuugaagaauuaagaguccaagcugaaaacaguagacuagaaaugcacuuuaaacuaaaagaagauuaugagaaaauucaacauuuagaacaagaauacaagaaagaaauuaacgauaaagaaaaacaaguaucauuacuacugauacaaaucacugaaaaagaaaauaaaaugaaagauuuaacuuuccuacuggaagaaaguagagacaaaguaaaucaauuagaagagaaaacaaaacuacaaucagaaaaccuaaaacaauccaucgaaaaacagcaccauuugacaaaagaacucgaagauaucaaaguaagccuacaacguaguguaagcacucaaaaagcacuagaagaagacuugcaaaucgccacgaaaacuauaugucaauuaacugaagaaaaagaaacacagauggaagaaaguaacaaagcgagagcagcacacaguuuuguaguaacagaguucgaaacuaccguauguucacuagaagaauuacuaagaacggaacaacagcggcuagagaaaaacgaagaucagcuaaaaauucuuaccauggaacuacagaagaaaagcagugaacucgaagaaaugacaaaauuaacaaacaauaaagaaguagaacuugaggagcuuaagaaagucuuaggagaaaaagaaacccuauuauacgaaaauaaacaauuugagaaaauagcagaagaacuaaaaggaacagagcaagaacuuauaggacuauuacaagcaagagaaaaagaaguacaugacuuagaaauucaauuaaccgcaauaacuacaagugagcaauacuauaguaaagaaguaaaagaucucaaaacagagcuggaaaacgaaaaacucaaaaacacggaacuaacaagccacugcaacaaacucucuuuagaaaacaaagaguuaacacaagaaacguccgauaugacccuggaacucaaaaaucaacaagaagacauaaacaacaauaagaaacaagaagaaagaauguuaaaacaaaucgaaaaccuacaagaaacagaaacccaauuacgaaacgaacuagaauacguacgagaggaauuaaaacagaaaagagacgaaguaaaaugcaaacuugacaaaucagaagagaacugcaauaaucucagaaaacaaguagaaaacaaaaacaaauauauagaagaacugcaacaagaaaauaaagcacucaaaaagaaagguacagcagagaguaaacaacugaaugucuacgaaauaaaaguuaauaaauuagaacuagaauuagagagcgcaaaacaaaaauucggagaaauaacagacacuuaccaaaaagaaauagaagacaagaaaauaucagaagaaaaucuguuggaagaaguagaaaaagccaaaguaauagcugaugaagcgguaaaacuccaaaaagaaauugacaaacgcugucaacauaaaauagcugaaaugguggcucucauggaaaaacacaaacaccaauaugauaaaauaaucgaagaaagagacuccgaacuuggccuuuacaaaaguaaagaacaagaacagaguagccugcgagcgucacuggaaauagaauuaagcaaucuaaaagcagaacuuuuaucagucaagaaacaacuagaaauagaaagagaagaaaaagaaaaacuaaaacgagaagcaaaagaaaauaccgccaccuuaaaagagaagaaagauaagaaaacacaaaccuuccuccuagaaaccccagaaaucuauuggaaauuagacucaaaagcagugccgucgcaaacaguaucaagaaacuucaccucaguagaccacgggaucucgaaagacaaaagagacuacuuauggacaucugccaaaaacacucugucaaccccgcuaccuaaagcguauacaguaaaaacgccaacuaaaccaaaacuacaacaacgcgaaaaccuaaacauuccaauagaagaaaguaagaagaaaagaaaaauggcauucgaauuugauaucaacagcgauagcuccgaaacgacagacuuauuaucaaugguaucagaggaagaaacccuaaaaacacuauacagaaacaacaaucccccagcuagccaccuuuguguuaaaacgccgaagaaagcaccgucaucauuaacuaccccaggaucaacacuaaaauuuggagcaauuaggaaaaugcgagaagacaggugggcggucauagcaaaaauggauaggaaaaagaaauugaaagaagcagaaaaauuauucguuuaa

SEQ ID NO: 3991 - RNA, 2931 nt, Artificial Sequence
  AAI26267 variant
auggaaaaacaaaaaccauucgcacucuucgugccaccacgaagcaguucuagccaaguaagcgcaguaaaaccacaaacucucggaggagacucuacauucuucaaaaguuucaauaaaugcaccgaagacgauuucgaguucccauucgcaaaaacaaacuuaagcaaaaauggagaaaauauagacagcgacccggcacuacaaaaagucaacuuucuaccaguucucgaacaagugggaaauagugacugccauuaccaagaaggacuaaaagacucagaccuagaaaacucagaaggucuaagccgaguauacucaaaacuauacaaagaagcagagaaaaucaagaaauggaaaguauccacagaagcagaauuacgacaaaaagaaaguaaauuacaagaaaaccgaaaaauuauagaagcacaacgaaaagcaauacaagaacuucaauuuggaaacgaaaaaguaagccugaaauuagaagaaggaauccaggaaaacaaagaccucauaaaagaaaacaaugcuacacgacaucuaugcaacuuacuuaaagaaaccugcgcaagaucagcagagaaaaccaagaaauaugaauacgaaagagaagaaacgagacaagucuauauggaccucaauaacaauaucgagaaaaugauuaccgccuucgaagaacuacguguacaagcggaaaacuccagauuggaaaugcacuucaaacugaaagaagacuaugagaaaauacaacaccuugaacaagaauauaagaaagaaauaaaugacaaagaaaaacaaguuagccuacugcuaauucaaauaacggaaaaagaaaauaaaaugaaagauuuaacauuccuucuagaagaaaguagagauaaagucaaccaauuagaagagaaaacaaaauuacagucagaaaaucuuaaacaaucaauagaaaaacaacaccauuuaacaaaagaacucgaagacauuaaaguaucauuacaacgaucaguguccacucaaaaagcacuagaagaagacuuacaaauagccacgaaaacaauuugucaauuaacugaagaaaaggaaacacaaauggaagaaaguaacaaagcuagagcagcccacaguuuugugguuacagaauuugaaacaacagucugcagucuagaagaacuacuacgaacagaacaacaaagauuagagaaaaacgaagaccaacuaaaaauauuaacaauggaauuacagaaaaaguccucagaacuagaagaaaugacaaaauuaacaaacaacaaagaaguagaacuagaagaauuaaagaaaguccuuggagaaaaagaaacauuacuauaugaaaacaaacaauucgagaaaauagcagaagaauuaaaaggcacagaacaagaacucauaggacucuuacaagcaagggaaaaagaaguacaugacuuggaaauacaauugacagcgauuaccaccucagaacaauacuacuccaaagaagucaaagacuuaaaaacagaacuagaaaacgaaaagcugaaaaauacagaacuaacaucacacuguaacaaauuaagccuagaaaauaaggaacuaacccaagaaacaagugacaugacucuggaacugaaaaaucaacaagaagauauaaauaacaauaaaaagcaagaagaacgaaugcucaaacaaauagaaaauuuacaagaaacggagacacaacuuagaaacgaauuagaguauguaagagaagaacuaaagcagaaaagagaugaagucaagugcaagcuagacaaaagugaagaaaacuguaacaaucuuagaaaacaaguugaaaacaaaaacaaauacauagaagaauugcaacaagaaaacaaagcucugaaaaagaaaggaacggcagaaagcaaacaacuaaacgucuaugaaauuaaaguaaauaagcuagaauuggaauuagaauccgcaaaacaaaaauuuggagaaauaacggacacguaccaaaaagaaauugaagacaagaaaaucagugaagagaaucuccucgaagaagucgaaaaagcaaaaguaauagcugacgaagcaguaaaacuccaaaaagaaaucgauaaaagaugucaacauaaaauagccgaaaugguagcacuuauggaaaaacacaaacaccaauaugacaaaaucaucgaagaacgagauagcgaacuaggucucuacaaaucaaaggaacaagagcaaagcucacuucgagcaagccuagaaauagaacucaguaaccuuaaagcugaacugcuaagugugaagaaacaacuagaaaucgaacgcgaagaaaaagagaaacugaaacgagaagcaaaagaaaacacagcaacgcuaaaagaaaagaaagauaagaaaacgcaaacauucuuacuagaaacaccggaaauauauuggaaauuagacuccaaagcagucccaucucaaacaguaaguagaaacuuuacaagcguugaucaugguauaagcaaagauaaaagagauuacuuauggaccucagcuaaaaacacgcucaguacacccuugccaaaagcauacaccguaaaaacaccuacgaaacccaaacuccaacaacgagaaaaucuaaacauuccgauagaagaaucuaaaaagaaacgaaaaauggcauuugaguucgacauaaacucagauagcucagaaacaacagacuuacuaagcaugguuuccgaagaagaaacacuaaaaacacuuuauaggaacaacaacccaccggcaucacaucuguguguaaaaacaccgaagaaagcaccaaguagccuaacaacaccagggucuacacuaaaauuuggagcaauaagaaaaaugcgagaagauagaugggcaguaauugcaaaaauggacagaaagaagaaacuaaaagaagcagaaaaacuauucguauga

SEQ ID NO: 3992 - RNA, 330 nt, Artificial Sequence
  AAI05300 variant
auggaaaaacaaaaaccauucgcacuauucguaccaccaagaucaagcucaucacaaguaucagcaguaaaaccacaaacacuaggaggagacucaacauucuucaaaucauucaacaaaugcacagaagacgacuucgaauucccauucgcaaaaacaaaccuaucaaaaaacggagaaaacauagacucagacccagcacuacaaaacguaaacuuccuaccaguacuagaacaaguaggaaacucagacugccacuaccaagaaggacuaaaagacucagaccuagaaaacucagaaggacuaucaagaguauacucaaaacuauaa

SEQ ID NO: 3993 - RNA, 1467 nt, Artificial Sequence
  BAF56181 variant
augucuguagcuuucgcagcaccaagacaaagaggaaagggcgaaauaacaccagcugcaauacaaaaaaugcuugacgacaacaaccaccuaauacaaugcaucauggacagucaaaacaaaggcaaaacaagugaauguucacaauaccaacaaaugcuacacacaaaucuaguauacuuagcaacuauagcagauucaaaucaaaauaugcaaucccucuuacccgcacccccaacccaaaacaugccaaugggaccaggaggaaugaaccaaucaggaccaccuccaccaccccgaagucacaauaugccauccgauggaauggucggcggagguccaccagccccacauaugcaaaaccaaaugaauggacaaaugcccggucccaaccacaugcccaugcaaggaccaggacccaaccaauuaaauaugacuaacucaucaaugaacaugccaucauccucccauggcuccaugggcggauacaaucauucagucccaucuucacaaucaaugcccguacaaaaccaaaugacaaugucacaaggacaaccaaugggaaacuacggaccaagaccaaauaugucaaugcaaccaaaucaaggaccuaugaugcaccaacaaccaccaucucaacaauacaauaugccucaaggagguggacaacauuaccaaggacaacaacccccaaugggaaugaugggacaaguaaaucaaggaaaucacaugaugggacaacgacaaaucccaccauacagaccaccccaacaaggaccaccacaacaauacuccggccaagaagauuacuacggagaccaauacagccauggaggacaaggaccaccagaagguaugaaccaacaauacuauccagacggacauaaugacuacggguaccaacaaccaucauauccagaacaaggcuacgacagaccauacgaagacucaucacaacacuacuacgaaggaggaaacucacaauacggacaacaacaagaugcauaccaaggaccucccccucaacaaggauauccaccacaacaacaacaauacccuggacaacaaggauacccaggccaacaacaagguuauggcccaucacaaggaggaccaggcccacaauauccaaacuacccacaaggacaaggacaacaauacggaggauacagaccaacacaaccaggaccaccacaaccaccccaacaaaggccauacggauacgaccaaauaaugccaaaaaaaccagccgaagacgaaaaugacagcaaaggagucucagaagcaucaggaccccaaaacgacggaaaacaacuacacccaccaggcaaagcaaacaucuccgaaaaaauaaacaaaagaucaggcccaaaaagaggaaaacacgcauggacccaccgauuaagagaaagaaaacaacuuguaauauacgaagaaauaucugacccagaagaagacgaugaauaa

SEQ ID NO: 3994 - RNA, 1374 nt, Artificial Sequence
  BAF56182 variant
augucaguagcauucgcagcacccagacaaagaggcaaaggagaaauaacaccagcagcaauacaaaaaaugcuagacgacaacaaccaucuaauccaaugcauaauggauucacaaaauaaaggcaaaacaucagaauguucacaauaccaacaaauguuacauacaaaccuaguauacuuagcaacaauagcagacucaaaccaaaacaugcaaagcuuacuaccagcaccaccaacacaaaacaugccaaugggcccaggagguaugaaucaaaguggaccuccuccaccaccaagaagucacaacaugccaucagauggaaugguaggaggaggaccacccgccccacacaugcaaaaccaaaugaacggacaaaugcccggacccaaucacaugccaaugcaaggaccuggcccgaaucaauuaaacaugacaaacucauccaugaauaugccaaguucaucucacggaaguaugggugguuauaaccauucaguaccaucaucacaauccaugccaguacaaaaccaaaugaccaugagccaaggacaaccaaugggcaacuacggaccucgaccaaacaugucaaugcaaccaaaccagggaccaaugaugcaccaacaaccaccaucacaacaauacaacaugccgcaaggaggaggacaacauuaccaaggccaacaacccccaaugggaaugaugggacaaguaaaccaaggcaaucauaugaugggacaacgacaaauaccuccauacagaccaccacaacaagguccaccacaacaauauucaggacaagaagacuacuacggagaccaauacucacacggaggacaaggacccccagaagguaugaaucaacaauacuacccagauggcaacagucaauauggacaacaacaagacgcauaucaaggacccccaccacaacaaggauacccaccacaacaacaacaauacccaggacaacaaggauacccaggccaacaacaaggcuacggcccaucacaaggaggaccaggaccacaauacccaaacuacccucaaggacaaggacaacaauauggaggcuauagaccaacccaaccaggaccaccccaacccccacaacaaagaccauacggauacgaccaaaucaugcccaaaaaaccagcagaagaugaaaacgacucaaaaggaguaucagaagcaucaggaccccaaaacgacggaaaacaacuacacccaccaggcaaagcaaauauaucagaaaaaauaaacaaaagaucaggaccaaaacgagguaaacacgcauggacacaccgacuaagagaaaggaaacaacuaguaaucuacgaagaaaucuccgacccagaagaagacgacgaguaa

SEQ ID NO: 3995 - RNA, 1467 nt, Artificial Sequence
  BAF56183 variant
augucaguagcauucgcagcaccuagacaaagagguaaaggcgaaauaacaccugcagcaauacaaaaaaugcuagacgacaauaaccaccuaauucaaugcauaauggacagucaaaacaaaggaaaaacaagcgaauguucacaauaccaacaaaugcuccacacaaaucuaguauacuuagccaccauagccgacucuaaucaaaacaugcaaucauuacuacccgcaccaccuacacaaaacaugccaaugggaccaggaggaaugaaccaaucuggaccaccaccaccccccagaucucacaauaugccuagcgacggaaugguaggcggaggaccuccagcaccacacaugcagaaucaaaugaacggacaaaugccaggaccgaaccacaugccaaugcaaggacccggaccaaaccaacuaaacaugacaaacaguagcaugaacaugccaucaucaucacauggaucaaugggaggauauaaccauucagucccaucaagucaaucuaugccuguacaaaaccaaaugacuaugucacaaggacaaccaaugggaaacuacgggccuagaccaaauaugucaaugcaaccaaaucaaggacccaugaugcaccaacaaccaccaagccaacaauauaacaugccacaaggcgguggccaacacuaccaaggacaacaacccccaaugggaaugaugggccaaguuaaucaaggcaaccacaugaugggacaaagacaaauaccaccauaccgaccaccacaacaaggaccgccacaacaauacagcggccaagaagauuauuacggagaccaauauucucauggaggacaaggaccaccagaaggaaugaaucaacaauacuacccagacggccauaacgauuauggauaccaacaaccaucauauccagaacaaggauaugacagacccuaugaagacaguagccaacacuacuaugaaggcggaaauucacaauacggacaacaacaagacgcauaccaaggaccaccaccccaacaaggauacccaccacaacaacaacaauacccaggucaacaagguuauccaggacaacaacaaggauauggaccaucacaaggcggaccaggaccucaauaucccaacuauccccaaggacaaggacaacaauauggcggauauagaccaacacaaccuggcccaccacaaccaccacaacaacgcccauauggauaugaccaaauaaugcccaaaaaaccagcagaagaaggaaacgacagcgaagaaguacccgaggcaucaggaccccaaaaugacggaaaagaauuaugcccaccaggaaaacccacaacaucagaaaaaauacacgaaagaucaggaccaaaaagaggagaacacgccuggacucacagacuucgagaaagaaaacaacuaguaauauacgaagaaauaucugauccagaagaagacgacgaauaa

SEQ ID NO: 3996 - RNA, 1374 nt, Artificial Sequence
  BAF56184 variant
augucaguagcauucgccgcaccaagacaaagaggaaaaggugaaauaacaccagccgcaauacaaaaaaugcuagacgacaacaaucaucuaauacaaugcauuauggacagccaaaacaaaggcaaaaccucagaauguucacaauaucaacaaaugcuacauaccaacuuaguauaucuagcaacaauagcagacucaaaccaaaauaugcaaagccucuuaccagcaccaccaacacaaaauaugccaaugggaccaggaggaaugaaccaaucaggaccaccaccuccaccucgcagccacaacaugccaucagacggcaugguaggcggaggaccacccgcaccacauaugcaaaaccaaaugaauggacaaaugccaggaccaaaucacaugccaaugcaaggaccagguccaaaccaacuuaauaugacaaauaguucaaugaauaugccaucaucaagccacggaagcaugggaggcuacaaccacucaguccccucaucacaaucaaugccaguccaaaaucaaaugacaaugucacaaggacaaccaaugggaaauuacggaccaagacccaacaugucuaugcaaccaaaccaaggaccuaugaugcaccaacaaccacccucacaacaauauaacaugccacaaggaggaggccaacauuaccaaggucaacaaccgccaauggguaugaugggacaaguaaaccaaggaaaucacaugaugggacaaagacaaaucccacccuacagaccaccacaacaaggaccuccacaacaauacagcggacaagaagauuacuauggagaucaauacucacacggaggacaaggaccaccagaagggaugaaccaacaauacuacccagacggaaacucacaauacggacaacaacaagaugcauaccaaggaccaccaccacaacaaggauauccaccgcaacaacaacaauacccuggacaacaaggauacccaggccaacaacaaggauauggaccaagucaaggaggccccggaccacaauacccaaacuacccacaaggacaaggccaacaauacggcggauauagaccaacacaaccaggacccccacaacccccacaacaaagaccauacggcuacgaccaaauaaugccaaaaaaaccagcagaagaaggaaacgacucagaagaaguaccagaagcaucaggcccacaaaacgacggaaaagaacuauguccaccaggaaaacccacaacaagcgaaaaaauacaugaaagauccggacccaaaagaggcgaacacgcauggacucacagauuaagagaaagaaaacaauuaguaauauacgaagaaauaucagauccagaagaagaugacgaauaa

SEQ ID NO: 3997 - RNA, 336 nt, Artificial Sequence
  AAI05590 variant
augaaaacaaacgacacauacaugaaauucucauggcuaacaguacccgaaaaaucacuagacaaagaacacagaugcauaguaagacacgaaaacaacaaaaacggaguagaccaagaaauaauauucccaccaauaaaaacagacguaauaacaauggacccaaaagacaacugcucaaaagacgcaaacgacacauuacuacuacaacuaacaaacacaucagcauacuacauguaccuacuccuacuacuaaaaucaguaguauacuucgcaauaauaacaugcugccuacuaagaagaacagcauucugcugcaacggagaaaaaucauaa

SEQ ID NO: 3998 - RNA, 177 nt, Artificial Sequence
  AAG29337 variant
augcaaauguucccaccaucaccacuauucuucuuccuacaacuacuaaaacaaucaucaagaagacuagaacacacauucguauuccuaagaaacuucucacuaaugcuacuaagauacauaggaaaaaaaagaagagcaacaagauucugggacccaagaagaggaacaccauaa

SEQ ID NO: 3999 - RNA, 1131 nt, Artificial Sequence
  AAF26776 variant
auggcuaacagcgcuaauacuaacacaguuccaaaacuauacagaagcguaauagaagacguaaucaaugacguaagagauauauuuuuagacgacgguguagacgaacaaguacucauggaacuaaagacacuuugggaaaacaaacuaaugcaaucaagagcaguagacggauuccacucugaagaacaacaauuauuacuacaaguacaacaacaacaccaaccacaacaacaacaacaccaucaccaccaccaccaccaacaagcucaaccacaacaaaccguaccucaacaagcacaaacacaacaaguauuaauaccagccucacaacaagcaacagcaccacaaguaauaguaccagacagcaaacucauccaacacaugaacgcaucaaacaugucagcagccgcaacagcagccacacuagcacuaccagcaggaguaaccccaguacaacaaauauuaaccaacaguggacaacuucuacaaguaguacgagcagcaaacggagcacaauacauauuccaaccacaacaaaguguaguacuacaacaacaaguaaucccccaaaugcaaccaggaggaguccaagcaccuguaauacaacaaguauuagcaccauuaccaggaggaaucagcccacaaacaggagucauaauucaaccccaacaaauauuauucacaggaaacaaaacacaaguaauacccacaacaguagcagcaccaacaccagcacaagcucaaauaacggcaacaggacaacaacaaccacaagcacaaccagcacaaacccaagcuccccuaguacuccaaguagacggaacaggagacacuucaucagaagaagaugaagaugaagaagaagacuacgacgaugaugaagaagaagacaaagaaaaagauggagcagaagacggucaaguagaagaagaaccacuaaacucagaagacgacguauccgacgaagaaggacaggaacuauucgacacagaaaauguaguaguuugucaauacgauaaaauacauagaagcaaaaauaaauggaaauuccaccuaaaagacggaauaaugaaccuaaacggaagagacuauauauucucaaaagcaauaggagacgccgaaugguaa

SEQ ID NO: 4000 - RNA, 1173 nt, Artificial Sequence
  AAH00125 variant
augccaccaucaggacuaagacuacuacuacuuuuacuaccauuacucuggcuacucguauuaaccccaggaagaccagccgcaggacucucuacaugcaaaacuauagacauggaacuaguaaaacgaaaaagaauagaagcaauaagaggacaaauauuaucaaaauuacgacuagcuucccccccuucacaaggagaagucccaccaggaccacuaccagaagccguacuagcuuuauacaacucaacaagagacagaguagcuggagaaucagcagaaccagaacccgaaccagaagcagacuacuaugccaaagaagucacaagagucuuaaugguagaaacucacaacgaaauauacgacaaauuuaaacaaucaacccacaguauauauauguuuuucaacacuucagaacuacgagaagcuguaccagaacccguauuacuaucucgagcagaauuaagacucuuaagauuaaaauuaaaaguagaacaacacguagaauuauaccaaaaauacuccaacaacuccuggcgauacuuaucgaaucgucuauuagcaccaucagauucuccagaaugguuaucauucgauguaacaggaguaguacgacaauggcuaucaagagguggagaaauagaaggauuuagacuuucagcacauuguucaugcgacucaagagacaacacacuacaaguagauaucaacggauuuacaacaggacguagaggagaccuagcaacaauacauggaaugaacaggcccuucuuacuacuaauggcaacaccauuagaacgagcucaacaucuacaaucaucacgacauagaagagcauuagauacaaauuacuguuucagcuccacagaaaaaaauuguugcgucagacaacuauauauagauuuccgaaaagaccuaggauggaaauggauacacgaaccaaaaggcuaccaugcaaacuucugccuaggcccaugcccauacauauggucauuagacacacaauauucuaaaguacuagcacucuauaaucaacacaacccaggcgccucagcugcaccauguugcguuccacaagcacuagaaccauuaccuauugucuacuauguaggaagaaaaccaaaaguagaacaauuaucuaauaugauaguaagauccugcaaauguucauaa

SEQ ID NO: 4001 - RNA, 1704 nt, Artificial Sequence
  AAT70724 variant
augggcagaggauuacuacguggauuauggccucuacacaucguacuauggacacgaaucgcaucaacaauuccuccccauguccaaaaaucagucaacaacgacaugauaguaacagacaacaacggcgccguaaaauuuccacaauuaugcaaauuuugugacguaagauucucaacaugcgacaaccaaaaaucaugcaugucaaacugcucaauaacaucaauaugcgaaaaaccacaagaaguaugcguagccguuuggagaaaaaaugacgaaaacauaacacuugaaacaguaugccacgaucccaaacuaccauaccacgauuuuauacucgaagacgcugcaucucccaaauguauuaugaaagaaaaaaaaaaaccaggagaaacauucuucaugugcucaugcucuucagacgaaugcaacgacaauaucauuuucucagaagaauacaauacauccaauccagaucuccuauuaguaauauuucaagucacaggaauaucauuauuaccuccauuaggaguagcaauaagcguaauaauaauauuuuacuguuauagaguuaaccgucaacaaaaauuaucaaguacaugggaaacaggaaaaacacgaaaauuaauggaauucucagaacacugugcuauaauauuagaagacgacagaucugauaucucuucaacaugcgcaaacaacauaaaucauaauaccgaauuacuaccuauagaauuagauacauuaguaggaaaaggacgauuugcagaagucuacaaagcaaaacucaaacaaaacacaucagaacaauucgaaacagucgccguaaaaauauuuccauaugaagaauacgcgucauggaaaacugaaaaagacauauuuagugacaucaacuuaaaacacgaaaauauccuacaauuccuaacagcagaagagagaaaaacagaauuaggcaaacaguacuggcuaaucacagccuuucaugcaaaaggaaaccuacaagaauaccuaacaagacacguaauaucaugggaagaucuccgaaaauuagguucaucacuugcaagaggcauagcacauuuacacucagaccacacccccuguggacgaccaaaaaugccaaucguacacagagacuuaaaauccucaaacauauuaguuaaaaacgaucuaacaugcugccuuugcgacuucggauuaucauuaagacuugacccgacauuaagcguagaugaccuagcaaacucaggacaagucgguaccgccagguauauggcacccgaaguacucgaaucaagaaugaauuuagaaaacgucgaaagcuuuaaacaaaccgacgucuauucaauggccuuaguccuaugggagaugacaaguagaugcaacgcaguaggcgaaguaaaagacuaugaaccaccauucggaucaaaaguccgagaacacccaugcguagaaucuaugaaagauaacguacuaagagauagaggacgaccugaaauccccagcuucuggcuaaaucaccaaggaauacaaauggucugugaaacauuaaccgaauguugggaccacgaccccgaagccagacuaacagcccaaugcgucgcagaacgauuuagcgaacuagaacaucuagaccgauuaucaggaagguccugcucagaagaaaaaauaccagaagauggcucauuaaauacaaccaaauaa

SEQ ID NO: 4002 - RNA, 2055 nt, Artificial Sequence
  BAG35778 variant
augauggacgcaaguaaagaauuacaaguccuacacauugauuuuuuaaaccaagauaacgccguaucacaccacacaugggaauuucaaacaagcaguccaguuuuucgccguggacaaguauuucaccuaagacuaguacuaaaccaaccuccacaaucauaccaccaauuaaaauuagaauuuucuacaggccccaauccaucaauagccaaacacacacuaguuguacucgauccuagaacaccuucagaccauuacaauuggcaagcaacacuacaaaaugaaucuggaaaagaaguaacagucgcgguaacaagcucaccaaacgcaauacucggaaaauaccaauuaaacguaaaaacaggaaaccauauucuaaaaagcgaagaaaauauacuauacuuauuauucaacccaugguguaaagaagauaugguauucaugccagacgaagacgaaaggaaagaauacauucuaaacgacacagguugccauuacguaggagcugcacgaucuauaaaauguaaaccauggaauuuuggccaauuugaaaaaaacguuuuagacuguuguauaucccuacuaacagaaucaagcuuaaaaccaacagaccgaagagauccaguauuaguauguagagcuaugugcgcuaugaugagcuucgaaaagggacaaggaguucuaauuggcaauuggaccggcgacuacgaaggaggaacugcaccauauaaauggaccggaagcgcacccauacuacaacaauacuauaauacaaaacaagcuguuuguuucggucaaugcuggguauucgcuggaauucuaacaacaguacuaagagcuuuaggaauaccugcaagaagcguaacaggcuucgauucugcucacgacacagaacgaaauuuaacuguagacacauacguaaacgaaaauggagaaaaaauaacaagcaugacccaugacucaguauggaacuuucauguauggaccgacgcauggaugaaaaggccugacuuaccuaaagguuacgacgguuggcaagcaguugacgccacaccccaagaaagaagucaaggagucuucugcugcggaccuuccccacucacugcaauaagaaaaggagacauuuuuauaguauaugacacacgcuucguuuuuucagaaguuaacggugacagacuaaucuggcuagucaaaaugguaaacggccaagaagaauuacaugucauuaguauggaaacuacgucaauuggaaaaaacauuagcacaaaagcagucggucaagauaggagacgagauauaacuuaugaauacaaauacccagaaggaucaagcgaagaaagacaaguuauggaccacgcauucuuacuacugucaagcgaacgagaacaccggagaccagucaaagaaaacuuucuacacaugucaguacaaucugaugauguguuacuaggaaauaguguaaacuucacaguuauacuuaaaagaaaaacagccgcacuacaaaauguuaacauacuaggaucauucgaacuacaauuauacacuggcaaaaaaauggcaaaacuuugugauuuaaauaaaacaucccaaauacaaggacaaguaucagaaguaacauuaacauuagacucaaaaacauauauuaauagcuuagcaauauuagacgaugagccagucauuagaggauuuauuauagccgaaauaguagaaucaaaagaaaucauggcuucagaaguuuuuaccagcuuucaauaucccgaauucucaauugaacuacccaauaccggaagaauaggacaauuacuaguauguaauuguauauucaaaaacacacuagcuaucccacucacagauguaaaauuuagccuagaaucacucgguauuaguucccuacaaaccagugaccacggcaccguacaaccaggagagacuauccaaucacaaauaaaauguacuccaauaaaaacaggcccaaaaaaauucauaguaaaacuaucaucaaaacaaguaaaagaaauaaaugcacaaaaaaucguacucauaacaaaauaa

SEQ ID NO: 4003 - RNA, 3375 nt, Artificial Sequence
  CCDS6519.1 variant
auggacucacuagcguccuugguauuguguggaguaucgcugcuacuaucggguacaguugaaggagcuauggacuuaauacuaauuaauucauuaccucuagugucagacgccgaaacgagccuaacgugcauagcaucaggauggcgaccucaugaaccaauaacaaucggaagagacuucgaagcauuaaugaaucaacaccaagauccucuugaagucacacaagacguaaccagggaaugggcaaagaaaguaguauggaaacgagaaaaagcaaguaaaauaaacggagcauacuucugugaaggcagaguaagaggagaggcaauacgaauaagaacuaugaaaaugagacaacaagcuagcuuccuuccugcaacauuaaccaugacuguagauaaaggagauaauguaaacauaucauuuaagaaaguauugauuaaagaagaagaugcagucauauauaaaaaugguucauuuauacacaguguuccccgucacgagguaccagauauauuagaaguucaucuuccacaugcccaaccgcaagaugcuggaguguauagcgcaagauacauagggggaaauuuauuuaccagcgcguuuacccgucuaauaguccggagaugugaggcucaaaaauggggaccggaaugcaaucauuuauguacagcaugcaugaauaauggcguuugucacgaagacacaggagaaugcaucuguccaccugguuuuaugggaagaacaugugaaaaagcaugugaacuucacacuuuuggaagaacauguaaagaaagguguaguggccaagaaggaugcaaauccuauguauucuguuuacccgacccauacgggugcagcugugcgacuggcuggaaaggacuacaauguaacgaagcaugucaccccggauuuuaugguccagauugcaaacuacgcugcucuuguaacaacggagaaaugugugauagauuccaaggauguuuauguucucccgguuggcaaggucuccaaugcgaacgagaaggaauacaaagaaugacaccaaaaauuguagauuugccagaccacauugaggugaauagcgggaaguuuaauccaauauguaaagcaagcggcuggccuuuacccacaaaugaagagaugacucuaguaaaaccagauggcacagucuuacacccaaaagauuuuaaucauacugaucauuucucaguagcgaucuuuacaauacaucguauucuaccuccagauucagggguuuggguuuguucuguuaauacaguagcaggaaugguagaaaaaccauucaauauaaguguaaaagugcuacccaaaccauuaaaugcaccaaacguuauugauacaggccauaacuuugcaguuauaaacauuucgucggaaccauacuucggugauggaccuauaaaaucaaagaaacuacuauauaaaccaguaaaccauuacgaagcauggcaacauauacaaguuacgaacgagauaguaacauuaaacuauuuagaaccuagaacagaguaugaacuaugcguacaacugguaagaagaggagaaggaggagagggccauccugggcccguccguagguucacaacagcgucuauaggauuaccaccaccuagaggucuuaaucuccuaccaaaaagucaaacgacauugaauuugacauggcaaccuauauuuccuaguagugaggaugacuucuacguagaagucgaacgacgcucuguucagaaaagcgaccaacaaaacauaaaaguaccugguaaucuuaccuccguacuacuaaauaauuuacacccaagagaacaauaugucguuagagcacgaguaaauacgaaagcucagggagaauggagugaagacuuaacagcauggacauuaucugacauucuaccaccacaaccagagaauauuaaaaucucuaauaucacacauucuucugcaguuauaagcuggacaauacuagacggauauucaauaucaucaauaacuauaagauauaaaguucaaggcaaaaacgaagaccaacacguagaugucaaaauuaaaaacgccacaaucacccaauaucaacuaaaaggauuagaaccagaaaccgcuuaccaaguagacauuuucgcagaaaacaauauaggaagcaguaauccagccuuuucgcaugaauuaguuacauuaccagaaucacaagcacccgcagacuuaggagguggaaaaaugcuucucauagcuauucucggaagcgcaggcaugacuugccuaaccguacuacuagcauuccuaauuauccuacaacuaaagagagcaaauguacagagacgaauggcacaagcauuucagaauguaagagaagaaccugcaguacaauuuaauagcggaacacuagcucuaaacagaaaaguuaaaaauaauccugauccaacaauauaucccguauuggauuggaacgauauuaaauuccaagacguaauaggagaaggaaacuuuggacaaguucuaaaagcacgcauuaagaaagacggacuccgaauggaugcagcaauaaaaagaaugaaagaauaugcuaguaaggaugaucaccgugauuuugccggagaacuugagguacuauguaaacuuggacaucacccaaacauaauuaacuuauuaggagcaugcgaacauagaggcuaucucuaucuagcaauugaauaugcuccccauggaaaccugcuugauuuccuccgaaaaucaagaguacuagaaacagaucccgccuucgcuaucgcaaauucaaccgcaucaacacuauccagucaacaguuguuacauuuugcagcagauguagcaagagggauggacuauuuaagucaaaaacaauuuauacauagagacuuagcagccagaaauauauuaguaggagaaaacuauguagccaaaauagcagauuuugguuuaagccgaggccaagaaguauaugucaagaaaaccaugggacgguuacccguacgauggauggcuauagagucguuaaauuacaguguauauacaacuaauucugacguauggaguuauggaguauuacuuugggaaauaguguccuuagguggaacaccguauugcgguaugacaugugccgagcuauacgaaaaauugccacaaggauacagauuggagaaaccuuuaaauugugaugacgaagucuacgaucuuaugagacaguguuggagagaaaaaccauacgaaaggccaaguuuugcucaaauccuaguaaguuuaaauagaauguuagaagaaagaaaaacauauguaaacaccacgcuauaugaaaaauuuacuuacgcuggaauagacugcucagccgaagaagcagcauaa

SEQ ID NO: 4004 - RNA, 1791 nt, Artificial Sequence
  BAF84950 variant
auggcugaugcagaagcaagagcagaguucccugaagaagcaagaccagacagagguacucuacaaguauuacaagacauggcuucaagauuacguauacacucaauaagagcgacauguucaacaaguagcggucacccaacaucauguaguaguucaucagaaauaaugucaguguuauucuucuacauaaugcgauauaaacaaucagauccagaaaauccagauaaugauagauuuguauuagcgaaaagauuaaguuucguagauguagcaacaggaugguuaggucagggacuagguguagcauguggaauggcuuacacaggaaaauauuuugacagagcaagcuauagaguauuuugccuuaugucagauggagaaucaagcgaagggucuguuugggaagcaauggcauuugcaaguuauuauucauuagauaaucucguugcaauauuugauguaaacagauuaggucacucaggugcauuaccugcugaacacuguauaaacauauaucaaagaagaugugaagcauuuggauggaacacauauguaguagacggaagagauguagaagcacuaugucaagucuuuuggcaagcuagucaaguaaaacacaaaccgacagcaguuguagcaaaaacuuuuaaaggaagaggaacaccuucaauagaagacgcagaaucauggcaugcaaaaccuaugccaagggaacgagcagaugcaauuauaaaauuaauugaaucacaaauacaaacuagccgaaauuuagauccacaaccaccuauagaagauaguccagaagugaauaucacagacguaagaaugacaucaccaccagauuauagaguaggugauaaaauagcuacacgcaaagcauguggacuagcauuagcaaaacuaggcuacgcaaauaauagaguaguaguuuuggauggagacacccgauauucaaccuucagugaaauauucaacaaagaauacccagaacgcuuuauugaauguuuuauggcagaacaaaauaugguaaguguagcccucggaugugccaguaggggaagaacuauagccuuugcuaguacauuugcagcuuuccuaacaagagcauuugaccauauaagaauaggaggacuugcagaaagcaacauaaauauaauaggaucccacuguggaguuagcguaggugaugauggcgcaucacaaauggcacuagaagauauagcaauguucagaacuauaccaaaauguacaauuuucuaucccaccgaugcaguuucuacagaacaugccguagcauuagcugcaaaugcgaaaggaaugugcuuuauaagaacaacuagacccgaaacaaugguaauauauacaccacaagaaagauuugaaauaggacaagcaaaaguuuugagacacugcguaucagauaaagucacgguaauaggagccggaauaacaguauacgaagcauuagcagcagcugaugaacuaaguaaacaagauauauuuauaagaguaauagauuuauuuacaauaaaaccccuugauguagcaaccauuguuucaagugcgaaagcaacagaagguagaauuauaacaguagaagaucauuauccacaaggaggaaucggagaagcaguaugcgcagcaguaucaauggauccagacauacaaguacauaguuuagcaguaagcgguguuccacaaucaggaaaaucagaagaauuacuagacauguaugggauaucagcacgccauauaauuguggcaguaaaaugcaugcuacuaaacuag

SEQ ID NO: 4005 - RNA, 861 nt, Artificial Sequence
  EAW88722 variant
auggcagaagauggagaagaagcagaauuucauuuugcagcauuauauauaaguggacaauggccuagauuaagagcagauacagacuuacaaagauuaggaagcagcgcaauggcaccaaguagaaaauucuuugucggaggaaauuggaaaaugaauggaaggaaacaaaguuuaggugaacuaauaggaacauuaaaugcagcaaaaguaccagcagauacggaaguagugugugcaccaccaacagcauauauagauuucgcaagacaaaaauuggauccaaaaauagcaguagcagcacaaaauuguuauaaaguaacaaauggagcauuuacaggagaaauaagucccggaaugauaaaagauugcggagcaacuuggguaguauuaggacacagugaaagaagacauguauuuggagaaucagaugaauuaauaggacagaaaguagcacaugcauuagcagaaggauuaggaguaauagcguguauaggugaaaaauuagaugaaagagaagcaggaauuacagaaaaaguaguauucgaacaaacaaaaguaauagcagauaauguaaaagacuggucaaaaguaguauuagcauaugagccuguaugggcaauaggaacaggaaaaacagcaacaccacaacaagcgcaagaaguacaugaaaaauuaagaggcuggcuaaaaucaaacguaucagaugcaguagcacaaucaacacgaauaauauauggaggaaguguaacaggagcaacauguaaagaauuagcaagccaaccagauguagacggauuucuaguaggaggagcaucauuaaaaccagaauuuguagauauaauaaaugcaaaacaauaa

SEQ ID NO: 4006 - RNA, 357 nt, Artificial Sequence
  CAA72108 variant
augccacuaguaguagcaguaauauucuucagccuauggguauucgcacuaggacaacuagaacaaccagaaauaucaauaucaagaccagcaaacaaaucagcacacauaucauggaaagcaucaauacaaggauucucaucaaaaauaauacacugguacuggcaaaaaccaaacaaaggacuagaauaccuacuacacguauucuuaacaauaucagcacaagacugcucaggaggaaaaacaaaaaaacuagaaguaucaaaaaacgcacacacaucaacaucaacacuaaaaauaaaauuccuagaaaaagaagacgaaguaguauaccacugcgcaugcuggauaagacac

SEQ ID NO: 4007 - RNA, 414 nt, Artificial Sequence
  EAL23985 variant
augcuaucacuacuacacacaucaacacuagcaguauuaggagcacuaugcguauacggagcaggacaccuagaacaaccacaaauaucaucaacaaaaacacuaucaaaaacagcaagacuagaaugcguaguaucaggaauaacaauaagcgcaacaucaguauacugguacagagaaagaccaggagaaguaauacaauuccuaguaucaauaucauacgacggaacaguaagaaaagaaucaggaauaccaucaggaaaauucgaaguagacagaauaccagaaacaucaacaucaacacuaacaauacacaacguagaaaaacaagacauagcaacauacuacugcgcacuaugggaaguacacagcucaagacaauucgaaccaucacacucaauaaacguauacuaa

SEQ ID NO: 4008 - RNA, 366 nt, Artificial Sequence
  CAA30181 variant
augcuaucacuacuacacacaucaacacuagcaguacuaggagcacuaugcguauacggagcaggacaccuagaacaaccacaaauaucaucaacaaaaacacuaucaaaaacagcaagacuagaaugcguaguaucaggaauaacaauaucagcaacaucaguauacugguacagagaaagaccaggagaaguaauacaauuccuaguaucaaucucauacgacggaacaguaagaaaagaaucaggaauaccaucaggaaaauucgaaguagacagaauaccagaaacaucaaccucaacacuaacaauacauaacguagaaaaacaagacauagcaacauacuacugcgcacuaugggaagua

SEQ ID NO: 4009 - RNA, 366 nt, Artificial Sequence
  CAA33345 variant
augcuaucacuacuacacacaucaacacuagcaguacuaggagcacuaugcguauacggagcaggacaccuagaacaaccacaaauaucaaguacaaaaacacuaucaaaaacagcaagacuagaaugcguaguaucaggaauaaaaauaucagcaacaucaguauacugguacagagaaagaccaggagaaguaauacaauuccuaguaucaauaagcuacgacggaacaguaagaaaagaaucaggaauaccaucaggaaaauucgaaguagacagaauaccagaaacaucaacaucaacacuaacaauacacaacguagaaaaacaagacauagcaacauacuacugcgcacuaugggaagua

SEQ ID NO: 4010 - RNA, 2382 nt, Artificial Sequence
  AAA93251 variant
augauggcagcauuauauccuucuaccgaucuuucaggugcaucaucaucaagucuacccucaagcccaucuaguucaucuccaaacgaagugauggcauuaaaagacguacgagaaguaaaagaagaaaacacauuaaaugaaaaacuauuccuacuagcaugcgauaaaggagauuauuauaugguuaagaaaauacuugaagaaaauuccucuggagaccugaacauaaauuguguagacguacuaggacgcaaugcaguaacaauaacaaucgaaaaugaaaaucuugacauucuccaacuauuauuagacuauggaugucaaucagcagaugcccuuuuaguagcgauagacucagaaguaguaggagcaguagacauacuacuaaaucacagacccaaaagaucaucccgacccacuauaguuaaauuaauggaaagaauccaaaauccagaauacucaacaacuauggacguagcuccagucauccuagccgcucacaggaauaauuaugaaauacucaccauguuacucaaacaagauguguccuuacccaaaccccaugcuguaggaugcgaauguacucuauguucagccaaaaacaagaaagauucacuacgacauucacguuuccgucuugauauauaccguuguuuagcaucaccagcccuaauaauguuaacugaagaagacccaauucuccgcgcauucgaacuaucugccgacuuaaaagaauuauccuuagucgaaguugaauuuagaaacgacuacgaagaacuagcacgacaauguaaaauguucgcaaaagaccuauuagcucaagcacgaaauucacgagaacuagaaguaauuuuaaaccacaccaguucggacgaaccccuugacaaacgcggacuauuagaagaaagaaugaauuuaucucgacuaaaauuagcaauaaaauauaaccaaaaagaauuuguaucccaauccaauugccaacaauuccucaauacaguaugguucggacaaaugucaggauaccguagaaaaccaaccuguaagaaaauuaugacuguacuaaccgucgguaucuucuggcccguccuaucacuuuguuaccucauugcacccaaaagccaauucggacgaauaauccauaccccauucaugaaauuuauaauacauggagcaucauauuucacauuucuuuuacuacuaaacuuguacucuuuaguuuacaacgaagauaagaaaaacacuauggguccagcucuugaaagaauagacuaucuacuaauccuauggauuauuggcaugauauggucugauauuaaacgacuaugguacgaaggacucgaagacuuucuagaagaaagcagaaaccaacuuucauucgugaugaauagccuauaucucgcuacauucgcacucaaaguuguagcacauaacaaauuucaugacuuugcugaccguaaagacugggacgccuuucauccaacauuaguugcugaagggcuguuugcuuuugcuaacgugcucucauaccuaagacuauucuuuauguauacuacaucaucaauucuuggaccucuccaaauaucaaugggacaaauguuacaagacuuuggaaaauuccuugguauguuccuucuaguccuauuuucauucacaauaggacuaacacaacuauacgauaaagguuacacaucuaaagaacaaaaagacuguguaggaauauucugugaacaacaaucaaaugauacauuccauaguuuuauugggacuuguuucgcuuuauuuugguauaucuuuucuuuagcccacguagcuauauucguuacacgauuuuccuacggagaagaacuucaaucauucguaggagcaguuaucguaggaacauacaacguaguaguuguuauaguacuaacaaaacuauuaguagcaaugcuccacaaaucauuccaacuuauagcuaaccacgaagauaaagaauggaaauucgcuagagcgaaauuaugguuaagcuauuucgaugauaaaugcacauuaccaccaccauucaauauaauaccaagcccaaaaaccauaugcuauaugaucagcucacuaucaaaauggauaugcucccacacuucaaaagguaaaguaaaaagacaaaauucacuaaaagaauggcgaaaccuaaaacaaaaacgugaugaaaacuaccaaaaagugauguguugucucguucauagauaccucaccucaaugcgccagaaaaugcaaagcacagaccaagcaacaguagaaaacuuaaacgaauuacgacaagaccuaucaaaauucagaaaugaaaucagagacuuacuuggauuucgaacuuccaaauaugcaauguuuuacccaagaaauuaa

SEQ ID NO: 4011 - RNA, 3315 nt, Artificial Sequence
  AAZ73614 variant
augucuuucagagcagcuagauugucaaugagaaauagacgcaacgacacacuggauuccacacggaccuuauauucaucggcaucaagaucaacagaucuaaguuauagugaaucagaccuugucaacuuuauacaagcgaacuuuaaaaaacgcgaauguguuuuuuuuacuaaagacucaaaagcaacugaaaauguaugcaaauguggauacgcacaaagucaacauauggaaggcacacaaauaaaccaaagugagaaauggaauuacaaaaaacacacuaaagaauucccuacagaugcuuuuggagauauccaauuugaaacacuugguaaaaaagggaaauauauacgacucaguugugauacagaugcagaaauuuuauaugaauuacugacacaacauuggcauuuaaaaacucccaaccuagugaucucagucacaggcggagccaaaaauuuugcccuaaaaccaagaaugagaaaaauuuucaguagacuaauauacauugcgcaaagcaaaggcgcuuggauacucacaggaggaacccacuacggucuaaugaaguauauuggagaagucguaagagacaacacaauuucacguucaucagaggaaaacauuguagcaauuggcauugcugcuugggguaugguuaguaauagagauaccuuaauaagaaacugcgacgccgaaggcuauuuuuuagcucaauaccuaauggacgauuucacaagagauccccuauauauacucgacaauaaccauacccaucugcuauuaguugacaaugguugucauggucacccaaccgucgaagcaaaauuaagaaaucaacuagaaaaauacauaagcgaaagaacgauacaagacucaaauuacgguggaaaaaucccaauaguaugcuucgcucaaggaggugguaaagaaacccucaaagcaauaaauacaucuauaaaaaacaaaaucccguguguaguuguagaaggcagcggacaaauagcugauguaauugcaucccuaguggaagucgaagacgcauuaaccuccucagcgguaaaagaaaaauuagugagauuucuaccaagaacuguaucacgacucccggaagaagaaacagagagcuggauaaaauggcucaaagaaauuuuggaaugcucacauuuacuaacagucauaaaaauggaagaagcaggagacgaaauaguaucuaaugcuaucucauaugcacuuuauaaagcauucucuacaagcgaacaagacaaagauaauuggaacggucaguugaaauuacuccuagaauggaaucaacuagauuuagccaacgaugaaauauucacuaaugaucgacgaugggaaagugcagauuuacaagaaguaauguuuaccgcauuaauuaaagauagaccuaaauucguaagacuauuccuagaaaacggcuuaaaucuaagaaaauuccuaacucaugacguacuaacugaacucuucaguaaucauuuuucaacacuaguauauagaaaccuucaaauugcaaaaaauucauacaaugacgcacuacuuaccuuuguauggaaauuaguagccaacuuuagacgagguuucagaaaagaagauagaaauggacgggaugaaauggacauagaauuacaugauguuagcccaauaacacgacauccacuacaagcacuauuuaucugggcuauacuacaaaacaaaaaagaacuaucaaaaguaauaugggaacaaacaagaggauguacacuagcugcacucggcgcaucuaaacuauuaaaaacuuuagcaaaagucaaaaacgauauaaaugcagcaggagagucggaagaacuagcaaaugaauacgaaacacgagccguugaauuauuuacagaauguuauucaagugaugaagacuuagcagaacaacucuuaguuuacucaugcgaagcaugggguggaaguaauugcuuagaacuugcuguagaagcgacugaucaacauuucauagcacaaccuggcguacaaaacuuucucucaaaacagugguauggagaaaucuccagagauacaaaaaauuggaaaauuauacuuugucuuuucauuaucccauuaguuggauguggcuuuguaagcuuucggaaaaaaccuguagauaaacacaaaaaacuacuaugguacuauguagcuuucuuuacaucaccauuuguugucuucaguuggaacguaguauucuauauagcauuucuacuacuauucgcauacguucuuuuaauggacuuccauagcgugccucacccaccagagcuaguacuauacucacuaguauuuguucucuucugcgacgagguacgacaaugguaugucaaugguguaaauuauuucaccgaccuauggaauguuauggacacuuuagguuuauuuuacuuuauagcugguauaguauucagauuacauucaagcaauaaaaguagucucuauucaggacgaguaauuuucugucuagauuacauaauauucaccuuaagacuaauacacauuuucacagucucuagaaauuuaggaccuaagauuauaaugcuacaacgaauguuaaucgauguuuucuuuuucuuauuuuuauucgcaguauggaugguagcauuugguguagcccgacagggaauacuaagacaaaaugaacagcguuggcgcuggauauucagaagugucauauacgaaccuuaccuugcaauguucggucaaguaccaucagacguggacggaaccaccuaugauuucgcucauuguaccuucacagguaacgaaucaaaaccauuaugcguagaauuagacgaacacaaccuaccucgauuuccagaauggauuaccauaccacuuguuugcauauacaugcuaucaacaaacauauuauuaguaaaccucuuaguugcgauguuuggcuauacgguaggaacaguucaggaaaauaacgaucaagucuggaaauuccaaagauauuucuuaguacaagaauacuguucacgucuaaauauaccguuccccuucaucgucuucgcauacuuuuauaugguaguaaaaaaaugcuucaaaugcugcugcaaagaaaaaaauauggaaucuucaguaugcugcuuuaaaaaugaagauaacgaaacccuagcaugggaaggagugaugaaagaaaauuaucuuguaaaaauaaacacaaaagcaaacgauacuucagaagaaaugcgacaccgauuuaggcaacuugacacuaaacuaaacgacuuaaagggauuauuaaaagaaauugcaaauaaaauaaaauga

SEQ ID NO: 4012 - RNA, 2097 nt, Artificial Sequence
  AAK13079 variant
augaugagauccagaagcaaaagcccacgaagaccguccccaacagcuagaggagcaaauugcgauguagaacuacuaaaaaccacaacaagggaucgugaagaauugaaaugcaugcuagaaaaauacgaacgacacuuagcagagauacaaggaaacguaaaaguacuaaaaucagaacgagacaaaauauuccuacuauacgaacaagcacaagaagaaauaacaagauuaagacgcgaaaugaugaaaucauguaaaucucccaaaagcacgaccgcacaugcuaucuuacgaagaguagaaacagaaagagacgucgcguucacagaccuaaggagaaugacaacagaaagagauaguuuaagagaaagauuaaaaaucgcucaagaaacugccuuuaacgagaaggcccaccuagaacaaaggauagaagaacuggaguguacaguacauaaccuugacgacgaaagaauggaacaaauguccaacaugacccuaaugaaagaaacuauuagcacggucgaaaaagaaaugaaaucauuagcaagaaaagcaauggauacagaaucagaacuaggacgacagaaagcugaaaacaauucacuaagacuacuauacgaaaacaccgaaaaagaccuaagugacacacaaagacaucuagcaaagaagaaauacgaacuacaacuaacacaagagaaaauaaugugccucgacgagaaaauagauaauuucacacgccaaaacauagcccaaagggaagaaauaagcauacucggggguacacugaaugacuuagcaaaagaaaaagaaugcuuacaagcaugucuagauaagaaaucggaaaauaucgcaucauugggagaaucccuagcaaugaaagagaaaacaauaagcggaaugaaaaacauaauagccgaaauggaacaagcaucacgacaguguacagaggcuuuaaucguaugcgaacaagacguaagcaggaugagaagacaacuugaugaaacaaaugacgaacuagcacaaauagcaagggaacgagacauauuagcacacgacaaugacaaucuacaagaacaauuugcaaaagcaaaacaagaaaaccaagccuuaucaaagaaauuaaacgacacccauaaugaacuaaacgacauaaaacaaaaagugcaagauaccaaccuagaaguaaacaaacuuaaaaacauacuaaaaagugaagaaagugaaaacagacaaaugauggaacaacuaagaaaagcuaaugaagacgccgaaaacugggaaaacaaagcgagacaaagugaagcugacaacaacacauuaaaacuugaacucauaacagccgaagccgaaggaaacagacuaaaagaaaaaguagacagucuaaauagagaaguugaacaacauuuaaacgccgaacgauccuacaaaucacaaauaucgacacuccacaagagcguagucaaaauggaagaagaacuacaaaaaguacaauuugaaaaagucagugccuuggcagacuugaguaguacacgagaauuauguaucaaacuagacaguucaaaagaacugcuaaacagacagcuaguagccaaagaucaagaaauagaaaugagagaaaaugaacuagacagcgcccauucagagaucgaauuacuacgaucgcaaauggcaaaugaaagaauaucaaugcaaaaucuagaagcccuauuaguagcuaacagagauaaagaauaccaaagucaaaucgcacuacaagaaaaagaaucagaaauacaauuacuaaaagaacaccuuugccuggcagaaaauaaaauggcaauacaaagucgagauguggcccaauuucgaaacguaguaacacaacuagaagccgauuuagauauaacaaaaaggcaauugggaaccgaaagauucgaaagagaaagagcaguacaagaacuaagacgucaaaacuacucaaguaacgccuaccacaugucuaguacaaugaaacccaacacuaagugucacaguccggaacgagcacaccauagaaguccugacagaggacuagacagguccuuagaagaaaaccuaugcuacagagauuucuaa

SEQ ID NO: 4013 - RNA, 927 nt, Artificial Sequence
  CCDS48205.1 variant
augagaccagaaggaucauuaacauauagaguaccagaaagguuaagacaaggauuuuguggaguagguagagcagcccaagcucuaguaugugcaagugcaaaagaaggaacagcauuuagaauggaagcgguacaagaaggagcagcgggaguagaaucagaacaagcugcacuaggagaagaagcaguauuauuauuagaugauauuauggcagaaguagaaguaguagcagaagaagaaggauuaguagaacgaagagaagaagcacaaagagcacaacaagcgguaccaggaccaggaccaaugacaccagaaagugcaccagaagaauuauuagcaguacaagucgaauuagaaccuguaaaugcacaagcaagaaaagcauuuaguagacaaagagagaaaauggaaagaagaagaaaaccacaucucgauagaagaggcgcaguaauacaaucaguaccagguuucugggcaaauguuauagcaaaucacccacaaaugucagcacuaauaacagaugaagaugaagauauguuaucauauaugguaucauuagaagucggagaagaaaaacaucccguacaucuauguaaaauaauguuauucuuuagaucaaauccauauuuucaaaacaaaguaauaacaaaggaauacuuaguaaacauaacagaauacagagcaucacauucaacaccaauagaaugguauccugauuaugaaguagaagcauauagaagaagacaucauaacucaucauuaaauuucuuuaauugguuuucagaucacaauuuugcaggaaguaacaaaauagcagaaauauuauguaaagauuuguggagaaauccacuacaauauuauaaaagaaugaaaccaccggaagaaggaacagaaacaucaggagacucacaauuauuaucauaa

SEQ ID NO: 4014 - RNA, 369 nt, Artificial Sequence
  M13231.1 variant
augagaugggcacuauuaguacuacuagcauuccuaucaccagcaucacaaaaaucaucaaaccuagaaggaagaacaaaaucagucacaagacaaacaggaucaucagcagaaauaacaugcgaccuaacaguaacaaacacauucuacauacacugguaccuacaccaagaaggaaaagcaccacaaagacuacuauacuacgacguaucaacagcaagagacguacuagaaucaggacuaucaccaggaaaauacuacacacacacaccaagaagauggucauggauacuaagacuacaaaaccuaauagaaaacgacucaggaguauacuacugcgcaacaugggacagacaaaaacuacuauaa

SEQ ID NO: 4015 - RNA, 804 nt, Artificial Sequence
  CCDS12619.1 variant
augggagcaagacaaauucaaacaucaucaucacaaacauccccagaagaagcaaugggaacaccccgcauacaacaccuacuaauauuauuaguacuaggcgcaucauuacuaaccuccggacuagaacuauacugccaaaaaggacuuucaaugacaguagaagcagacccagccaauauguuuaacuggacaacugaagaaguagaaacaugcgacaaaggagcauuaugccaagaaacaaucuuaauaauaaaagcaggaacagaaacagccauacucgcaacaaaaggaugcauaccagaaggagaagaagcaauaacaauaguacaacacucaucaccaccaggacuaauaguaacaucauacucaaacuacugcgaagacucuuucuguaaugacaaagacagucuaucacaauucugggaauuuucagaaacaacagcaucaacaguaagcacaacacuacacugcccaacaugcgucgcacucggaacaugcuucuccgcaccaucacuaccaugcccuaacgguacaacacgauguuaccaaggaaaacuagaaauaacuggagguggaauugaaucauccguagaaguaaaaggauguacagcaaugauaggaugcagacuaaugucaggaauacuagcaguaggaccaauguuuguaagagaagcaugcccacaucaacuucuaacacaaccaagaaaaacagaaaacggagcuacaugccuaccaauaccaguauggggauuacaacuccuauuaccacuacuacuaccaucauucauacacuuuucauaa

SEQ ID NO: 4016 - RNA, 1590 nt, Artificial Sequence
  AHZ44440 variant
augcucuuagccguacuauauugccuucuauggucauuucaaacauccgcuggacauuuuccaagagccugcguaucaucuaaaaaucuaauggaaaaagaaugcugcccaccauggucaggcgauagaucaccauguggacaauugucaggcagaggaagcugucaaaauauacuauuaucaaaugcuccccuuggaccucaauucccauuuacaggagucgaugaucgagaaucauggccaagcguauuuuauaaucguacaugucaauguucaggaaacuuuaugggcuucaacuguggaaacuguaaauucgguuuuuggggcccaaacuguacagaacgaagacuucuaguuagaagaaauauuuuugaucuaucugcaccagaaaaagauaaauucuucgcauauuuaaccuuagccaagcauacaauaucaucagauuacguaauuccaauaggaacauacggucaaaugaaaaauggaucaacaccuauguucaacgacauaaauauauaugauuuauucguuuggaugcacuauuacguuaguauggaugcacuauuaggcggaucagaaauauggagagauauagauuucgcacaugaagccccugcauuccuucccuggcacagauuauucuuacuaagaugggaacaagaaauacaaaaauuaacaggagacgaaaauuuuacaauaccauauugggacuggcgagaugcugaaaaaugcgauaucuguacagaugaauacaugggaggacaacauccaaccaaccccaacuuauuaucaccagcaucauucuuuucuucauggcaaauuguaugcucaagacuagaagaauauaauucucaucaaucccuauguaauggaacaccagaaggaccauuaagaagaaacccaggaaaucacgauaaaucaagaacccccagauuaccuucaucugcagauguagaauuuugucucagccuaacucaauaugaauccggauccauggauaaagcagcaaauuucucuuucagaaacacauuagaaggauuugccucaccauuaacagguaucgcagaugcaucccaaucauccaugcauaaugcucuacauauauauaugaauggaaccaugucacaaguacaagguucagcaaaugauccaauuuuccuacuacaccaugcauuuguagauucaauauuugaacaauggcuccgaagacauagaccacuacaagaaguauauccagaagcaaaugcaccaauaagacacaauagagaaucauauaugguaccuuuuauaccacuauauagaaacggcgacuucuuuauuucuucuaaagaucuaggauaugacuauucauaucuacaagacucugauccagauuccuuucaagacuauauaaaaaguuaucuagaacaagccucaagaauauggucauggcuacuuggcgccgccaugguaggcgcaguacucacagccuuacuagcaggacuuguuagccuacuaugccgacacaaaagaaaacaacuuccagaagaaaaacaaccccuacuaauggaaaaagaagacuaccauuccuuauaucaaucacacuuauaa

SEQ ID NO: 4017 - RNA, 1590 nt, Artificial Sequence
  AGV39051 variant
augcuauuagcagucuuauacugcuuauuauggucauuccaaacaucagcuggccauuucccacgagcaugcguaagcaguaaaaacuuaauggaaaaagaauguugcccaccauggucaggugacagaucacccuguggacaacuaucaggaagaggaucaugucaaaacauauuauuaaguaaugcaccacucgggccacaauuuccauuuaccggugucgaugacagagaaucauggccuuccguauuuuauaacagaacaugccaaugcucaggaaacuuuaugggauucaacuguggaaacuguaaauuuggauucuggggaccaaauugcacagaacgaagacuucuaguaagacgaaacauauucgaccuauccgcaccagaaaaagauaaauucuuugcauaccuaacacuagcaaaacacaccauaucuucugacuaugucauacccauaggaacauauggacaaaugaaaaauggaucgacaccaauguuuaaugauauaaauauauaugaucuauucguauggaugcacuauuauguaucaauggacgcacuuuuaggagguucagagauuuggcgagacaucgauuucgcucaugaagcaccagcauuuuuaccauggcaucgcuuauuucuacuccgaugggaacaagaaauacaaaaauuaacaggagacgaaaauuuuacaauaccauauugggauuggagagacgcagaaaaaugcgauauauguacagaugaauauaugggaggacaacacccaacaaauccaaauuuacucucuccagcaucuuucuuuucaucauggcaaauaguaugcaguagacuagaagaauauaauucacaccaaucucucugcaauggaacaccagaaggaccauuaagaagaaauccuggaaaccaugacaagucacguacaccaagacuaccuucaucagcagauguagaauuuugucuaucacucacccaauacgaaucaggaucaauggacaaagcugcaaauuuuucuuuccgaaacacucuagaaggauuugcaaguccucuaacuggaaucgcagacgcuucccaaucaucuaugcauaaugcacuccauaucuauaugaauggaaccaugucucaaguacaaggauccgcaaaugauccaauauuccuuuuacaucacgcauuuguagauucaauauuugaacaauggcuaagaagacaccgaccacuacaagaaguauauccagaagcuaacgccccaauuggucauaauagagaaucauacaugguuccauuuauaccauuauacagaaauggagauuucuuuauaucaagcaaagaccuuggauacgauuauucauaccuacaagauucugacccagacucuuuucaagauuauauaaaaaguuacuuagaacaagccucaagaaucuggucauggcucuuaggagcagccaugguuggagcaguucuaacagcacuucuugcaggcuuaguuucauuacucugucgacacaaaagaaaacaacuaccagaagaaaaacaaccacucuuaauggaaaaagaagacuaccauuccuuauaucaaucacauuuauaa

SEQ ID NO: 4018 - RNA, 1590 nt, Artificial Sequence
  AGV39049 variant
augcuauuggcaguacuauauugccuauuauggucauuucaaacuucugcaggacauuuuccuagagccugcguaucuuccaaaaaccuaauggaaaaagaauguugucccccauggucaggagaccguucaccuugcggacaacuaucuggaagagguucaugucaaaauaucuuauuaucaaacgcaccucuaggaccacaauucccauuuacaggaguagaugacagagaaucauggccaucuguauucuauaaccgaacaugucaauguucaggaaauuucaugggauucaauugcggaaauuguaaauuuggcuuuuggggacccaauugcacagaaagacgucuacucguacgccguaacauauucgauuuaucagcaccagaaaaagauaaauucuuugcauaccuaacauuagccaaacacacuauuuccagugauuauguaauccccauaggaacauacggucaaaugaaaaauggaucgacacccauguuuaacgauauaaacauauacgaucuauucguauggaugcacuauuauguauccauggaugcucucuuagguggcucagaaauauggcgagauauagacuucgcucacgaagcaccagcauuccucccauggcacagauuauucuuacuaagaugggaacaagaaauacaaaaacuuacuggagacgaaaacuucacaauaccauauugggauuggagagaugcagaaaaaugugacaucugcaccgaugaauacaugggaggacaacauccuaccaauccaaaccuucuaucaccagcaucuuucuucucauccuggcaaauaguuuguucaagacuagaagaauacaacucacaucaaucucuuuguaacggaacaccugaaggaccacuaagacgaaacccaggcaaccacgauaaaucaagaacaccacgacuuccaucaucagccgauguagaauuuugucucucacuaacacaauaugaaucuggaagcauggauaaagcagcaaacuucuccuuuagaaauacacucgaaggauuugcaucaccauuaacagguauagcagaugcuucccaaucaucuaugcauaacgcccuacauauauauaugaaugguacaaugagccaaguccaaggaucagccaaugacccaauuuucuuguuacaucacgccuucguagacuccauauuugaacaauggcuacaaagacacagaccccuucaagaaguauauccagaagcaaacgcaccuauaggacauaauagagaaucuuacaugguucccuuuauaccacuauaucgaaacggagacuucuucauaucaucaaaagaucuaggauacgacuauucuuauuuacaagacucugaccccgacuccuuccaagacuauauaaaaucauacuuagaacaagcaucaagaauauggucauggcuauuaggagcagccauggucggagcaguauuaacagcacuucuagcuggauuaguaucauuauuauguagacacaaaagaaaacaacuuccagaagaaaaacaaccccuucuuauggaaaaagaagacuaccacucauuauaucaaucacacuuauaa

SEQ ID NO: 4019 - RNA, 1590 nt, Artificial Sequence
  AGV39050 variant
auguuauuagccguauuauauugcuuauuauggucauuucaaacauccgcuggccacuuuccaagagcaugcguaucauccaaaaacuuaauggaaaaagaaugcuguccucccuggucaggagaucgaucaccaugcggacaauuaucaggaagaggaucaugccaaaauauauuacuaucuaaugcuccacuuggaccacaauuuccauuuacgggcgucgaugauagagaaucauggccaucaguauuuuauaauagaaccugucaauguucuggaaacuuuauggguuucaauuguggaaacugcaaauuugguuuuuggggccccaauugcacagaaagacgacuuuuaguaagacguaacauauucgaucuauccgcaccugaaaaagacaaauuuuucgcauaucuaaccuuagcaaaacauacaauaucauccgauuaugucauucccauaggaacauacggacaaaugaaaaauggaucaacuccuauguuuaacgauaucaauauauaugaucuuuucguauggaugcacuauuauguaucuauggacgcacuauuaggaggcuaugaaauauggagagauauagacuucgcacaugaagcccccgcauuuuuaccauggcauagauuauucuuacuacgaugggaacaagaaauacaaaaacuaacuggagaugaaaacuucacaauaccuuacugggauuggcgugaugcagaaaaaugugauauuugcacagaugaauauauggguggacaacacccuacaaauccaaauuuacuaucuccugcaaguuucuuuuccucuuggcaaauaguaugcucuagacuugaagaauauaacucacaccaaucuuuauguaacgguacaccugaaggaccauuacgaagaaauccagguaaucacgauaaaucaagaacuccaagacuaccaucaucugcagauguagaguucugucuaucauuaacacaauaugaauccggaaguauggauaaagcugcaaacuuuucauucagaaauacucuagaaggauuugcaucuccacuaaccggaauagcagacgcaucucaaucuucaaugcauaaugcauuacacauauauaugaauggaacaaugucucaaguucaaggaucagcuaacgauccuauauuucuucuacaucaugccuucguagauuccauauuugaacaauggcuaagaagacauagaccucuacaagaaguuuaucccgaagcaaaugcaccuauaggucacaaucgagaaucauauaugguaccauucauaccacuauauagaaauggagauuucuuuauaucaucaaaagacuugggauaugacuauucauaucuacaagauagugacccagacaguuuccaagauuauauaaaaucauaucuagaacaagcaucaagaauauggucaugguuauuaggagcagcaaugguaggagcaguccuaacugcacuacuagcuggauuaguaucauuauuaugccgacacaaaagaaaacaauuaccagaagaaaaacaaccacuacuaauggaaaaagaagauuaucacaguuuauaucaaucacaucuuuaa

SEQ ID NO: 4020 - RNA, 714 nt, Artificial Sequence
  CAA04137 variant
augucaccuuuaugguggggauucuuacuaucaugcuuaggaugcaaaauauuaccaggagcacaaggacaauuuccacgaguauguaugacaguagauucacuaguaaauaaagaaugcuguccaagacuaggagcagaaagcgcaaauguauguggaucacaacaagguagaggacaauguacagaaguaagagcagauacaagaccauggucaggaccauauauauuaagaaaucaagaugaccgagaacuauggccaagaaaauucuuucacagaacauguaaauguacagguaauuuugcaggauauaauugcggagacuguaaauuugguuggacaggaccaaacugcgaaagaaaaaaaccaccaguaauacgacaaaauauacauucacuaucaccacaagaaagagaacaauuucuaggagcuuuagaccuagccaaaaaaagaguccauccagauuacguaauaacaacacaacacuggguaggacuauuaggaccaaacggaacacaaccacaauuugcaaauuguaguguauaugauuuuuuuguaugguuacauuauuauucaguaagagauacauuauuaggaggauuuuuuccaugguuaaaaguauacuauuacagauucguaauaggauuaagaguauggcaaugggaaguaauaucaugcaaacuaauuaaaagagcaacaacaagacaaccauaa

SEQ ID NO: 4021 - RNA, 1590 nt, Artificial Sequence
  AAA61242 variant
auguuacuagcuguauuauauugucuauuauggucauuccaaacaucagcuggacacuuuccaagagcaugcguauccuccaaaaaucuaauggaaaaagaauguugcccuccauggagcggugaccgauccccaugcggacaauuaaguggaagaggaaguugucaaaauauacuucuaucaaacgcaccauuaggcccccaauuuccauuuacuggaguagaugaucgagaaucauggccuuccguauuuuacaaucguacaugccaauguaguggaaacuucaugggcuucaacugcggaaauuguaaauuuggauucuggggaccuaauuguacagaacguagacuuuuaguaagaagaaacauauuugaucuaucagccccagaaaaagauaaauucuuugcauauuuaacuuuagccaaacauaccauaucaucugauuaugucauaccaauaggcaccuacggacaaaugaaaaauggcucaacaccaauguuuaaugauauaaauauuuacgacuuauucguauggaugcauuacuauguaucuauggaugcacuacuaggagguucagaaauauggagagauauagauuuugcacacgaagcaccagcauuucuaccauggcaucgacuauuucuacuaagaugggaacaagaaauacaaaaauuaacuggagacgaaaauuucacaauaccuuacugggacuggcgagacgcugaaaaaugugauauauguacagaugaauauaugggaggacaacauccaacaaacccaaaucuccuuucaccagcaucuuucuuuucuucauggcaaauaguaugcagcagauuagaagaauacaacucacaucaaucacuaugcaacgguacaccugaaggaccacuaagaagaaaccccggaaaucaugacaaaucaagaacaccaagauuaccaucauccgccgauguagaguucugucuaucauuaacacaauacgaaucugguuccauggacaaagcagcaaauuucagcuuucgaaauacccuagaaggauuugcaucuccccucaccgguauugcugacgcaucacaaucaaguaugcacaacgcacuccauauauacaugaaugguacaaugagccaaguacaaggauccgccaaugauccaauuuuccuucuacaccaugcuuuuguagacucuauauuugaacaaugguuaagacgacacagacccuuacaagaaguauauccugaagcaaaugcaccuauaggccacaacagggaaucauauaugguaccauuuaucccacuuuaucgaaacggcgauuucuuuauaucuuccaaagaccuaggauaugauuauaguuaucuccaagauucagacccagauuccuuccaagacuacauaaaaucauaucuagaacaagccucacgcauauggucuuggcuauuaggcgcagccaugguaggagcuguucucacagcacuauuagcaggucuaguaucacuccuauguagacacaaaagaaaacaacuacccgaagaaaaacaaccauuacuaauggaaaaagaagauuaucauucauuauaucaaucacaccuuuaa

SEQ ID NO: 4022 - RNA, 1590 nt, Artificial Sequence
  AGV39054 variant
augcuacuagcaguauuauauuguuuacucuggucauuucaaaccucagcaggacauuucccaagagcauguguaucauccaaaaaccuaauggaaaaagaauguugcccuccauggaguggagacagaucaccuugcggccaauuaagcggaagagguucaugucaaaauauacuauuauccaaugcaccauuaggcccccaauuuccauuuacagguguagacgaucgagaauccuggccaucagucuucuauaacagaaccugccaauguucugguaacuuuaugggauuuaauugcggaaauuguaaauuuggauuuuggggaccaaacugcacagaaagaagauuacucguacgaagaaacauauucgaucuaucagcaccagaaaaagacaaauucuuugccuaucuaacccuagcuaagcauacaauaaguucagauuauguaauaccaauuggaacuuauggacaaaugaaaaauggaucgacaccaauguucaaugacauuaauauauaugaccucuucgucuggaugcauuacuaugucucuauggacgcucuauuaggagguucagaaauauggagagacauagauuucgcacacgaagcuccagccuuucuccccuggcaucgacuauuccuacuacgaugggaacaagaaauacaaaaauuaacaggagaugaaaacuucacaauaccauauugggacuggagagacgcagaaaaaugugauauuuguacagaugaauacguaggaggacaacaucccacaaacccaaacuuauuauccccugcaucauucuuuuccucauggcaaauaguuugcuccagacuugaagaauauaauucucaucaaucauuauguaacggaacaccagaaggacccuuaagaagaaaucccggaaaucacgacaaaucaagaacaccaagacucccuaguucagcagauguagaauuuugucucucauuaacacaauaugaaucagguucaauggacaaagcugcaaauuucucauucagaaacacauuagaaggguuugcuucaccauuaacugguauagcagacgcaucacaaucaucaaugcauaacgcucuacacauauacaugaacggaacaaugucccaaguacaaggaucagcaaaugauccaauauuuuuacuacaucaugcauucguagacucaaucuuugaacaaugguuaagacgacaccgcccauugcaagaaguauauccagaagcaaaugccccaauaggccauaaccgagaaucauauaugguaccauucauaccacucuacagaaauggugauuucuuuaucucuucaaaagaccuuggauaugacuauucauaucuacaagauucagacccagauucauuccaagauuacauuaaauccuaucuagaacaagcaucuaggauuuggucaugguuacuaggagcagcaaugguaggagccguacuaacagcauuacuagccggucuagucucauuauuauguagacacaaacguaaacaacuuccagaagaaaaacaaccacucuuaauggaaaaagaagacuaccauucauuauaucaaucacaccuauaa

SEQ ID NO: 4023 - RNA, 1590 nt, Artificial Sequence
  AGV39162 variant
augcuauuagccguacuuuacugcuuacuauggucauuccaaacaucagcugggcacuucccacgagcaugcguuucuagcaaaaaucucauggaaaaagaauguuguccaccauggucaggugacagauccccauguggccaacuauccggaagaggaucuugucaaaacauauuauuaaguaacgcaccauuaggaccacaauuuccauuuacaggaguagaugacagagaaucuuggccaucaguauucuauaacagaacaugccaaugcaguggaaauuuuaugggauucaauugcgguaauuguaaauuuggauuuuggggacccaauugcacugaacgaagauuauuaguaagaagaaauauuuucgauuuaucugcaccugaaaaagauaaauucuuugccuauuuaacacucgcuaaacacaccauuucaucagauuauguaauaccaaucggaacauauggccaaaugaaaaauggcucaacuccuauguuuaaugacauaaauaucuacgacuuauucguuuggaugcauuauuacguaucaauggacgcacuccuaggaggaucugaaauauggagagauauagauuuugcucacgaagcuccagcauuucuaccauggcacagauuauuuuuacuuaggugggaacaagaaauacaaaaauuaacaggagaugaaaauuucacuauacccuacugggacuggagagacgccgaaaaaugcgacauauguacagaugaauacaugggaggccaacacccaaccaauccaaaucuccuuuccccugcaucauucuuuuccucauggcaaauaguauguucaagacuagaagaauauaacucacaucaaucucuaugcaauggaacaccugaaggaccauuaagacgcaauccagguaaucacgauaaaucaagaacuccaagauuaccaaguucagcagauguugaauuuuguuuaucuuuaacacaauaugaaucaggaucaauggauaaagcugcaaauuuuaguuucagaaauacacucgaagguuuugcaucaccacuaacaggaauagcagacgcaucccaauccucaaugcacaaugcuuuacauauauauaugaauggaacaaugagucaaguacaaggaucagcuaaugauccaauuuuucuauuacaccaugcauucguagacucaauauucgaacaaugguuaagaagacaucgauuacuccaagaaguauaucccgaagcaaaugcaccaaucggucacaacagagaauccuacaugguaccauuuauaccacuauauagaaauggagacuuuuucauuuccucaaaagaccuugguuacgacuauucauaucuacaagacucagacccugacuccuuccaagacuauaucaaaucauacuuagaacaagccagccgaauauggucaugguuacuuggagcagcaauggucggugcaguucuaacagcuuuacuagcaggacuuguaucucuacuuugcagacacaaaagaaaacaacuuccagaggaaaaacaaccccuccucauggaaaaagaagacuaucauucauuauaucaaucacacuuauaa

SEQ ID NO: 4024 - RNA, 1590 nt, Artificial Sequence
  AGV39086 variant
augcuauuagcaguauuauacugccuauuauggucauuucaaacaucagcaggacauuuuccacgagcauguguaucuucuaaaaauuuaauggaaaaagaauguuguccacccuggucuggagauagaucaccauguggacaacuaagcggaagaggaucaugucaaaauauacuauuaucaaaugcaccauuaggcccacaauuuccauuuacugguguagaugacagagaauccuggcccucaguauucuauaacagaacaugucaauguagcggcaacuucaugggauuuaacugcggaaauuguaaauucggauuuuggggcccuaauugcacagaaagaagacuccuaguuagaagaaauauauuugaucuauccgcaccagaaaaagauaaguucuuugcuuaucuaacacuugcaaaacauacaauaaguagcgauuacguaauuccaauuggaacauacggacaaaugaaaaacggcuccacaccaauguuuaacgauauaaauauauaugacuuauucguauggaugcacuacuacguaucuauggacgcccucuuaggaggaagcgaaaucuggcgagauauagacuucgcacaugaagccccugcauucuuaccauggcauagacuauucuuauuacgcugggaacaagaaauacaaaaauuaacaggugacgaaaauuuuaccauuccauacugggauuggcgugacgcagaaaaaugugauauaugcacagacgaauauaugggaggacaacauccaacaaacccuaaccuauuaucaccagcaucauucuuuuccucauggcaaauaguuugcuccagacuagaagaauacaauucucaccaaucauuauguaacggcacaccagaaggaccauuaagaagaaacccaggaaaccacgauaaauccagaacucccagauuaccaagcucagcagacguagaauuuuguuuaucacucacacaauaugaaucaggcucaauggauaaagcagcuaacuuuuccuucagaaauacacuagaaggauuugcuucaccauuaaccgguaucgcagaugcaucacaaagcucuaugcacaaugcccuccacauauauaugaauggaacaaugucacaaguacaaggaucagcaaacgauccaauauucuuacuacaucacgcuuuuguagacuccauguucgaacaaugguuaagacgacacagaccacuccaagaagucuauccagaagcuaaugcaccaauaggacacaacagagaaaguuauaugguaccauuuauaccacuauauagaaauggagauuucuuuauuucuucaaaagacuuaggauaugacuauucauacuuacaagauuccgacccagacucauuucaagacuauaucaaaucauauuuagaacaagcauccagaauuuggagcugguuacuaggagcugcaaugguaggagcuguacuaacagcacuacuagcuggucuaguuucacuuuuauguagacacaaacgaaaacaauuaccugaagaaaaacaaccuuuauuaauggaaaaagaagacuaccacucauuauaccaaucacauuuauaa

SEQ ID NO: 4025 - RNA, 1614 nt, Artificial Sequence
  AAC15468 variant
augucugcaccuaaauuacuaagccuaggaugcauauucuucccauuacuauuauuccaacaagcacgagcacaauuuccacgacaaugugcuaccguugaagcauugcgcucgggaauguguuguccagauuuaucaccaguaagugguccaggaacugaucgaugcggaucaucaucuggaagaggucgaugugaagcaguuaccgcagacucaagaccacauucuccacaauauccacacgauggaagagacgaucgagaaguuuggccauuaagauucuucaacagaacuugccacugcaauggaaauuucuccggacacaauugcggaacauguagaccaggauggagaggagccgcaugcgaucaacgaguccucauaguaagaagaaaccuacuagaccucucaaaagaagaaaaaaaucauuuuguaagagccuuagacauggcaaaaagaacaacucauccacuauuuguaauagcgaccagaagauccgaagaaauauuaggacccgacggaaauacuccacaauuugaaaauauaucaauauacaacuauuucguauggacacauuauuauaguguaaaaaaaacauuccuaggaguaggacaagaaucauucggagaaguugauuucucucaugaagguccugcauuucucacauggcauagauaccacuuauuaagauuagaaaaagauaugcaagaaaugcuacaagaaccaucuuuuucauuaccauauuggaauuuugcaacuggaaaaaacguaugcgauauuuguacugaugacuuaaugggaucuagaucaaauuuugauucuacauuaauuucaccaaauucaguauucucacaauggcgaguuguaugugacucucucgaagacuacgauacucuaggaaccuuaugcaauucaacagaagauggaccaauaagaagaaauccagcugguaauguagcaagaccuaugguucaaagacuaccugaaccccaagauguugcacaaugccuagaaguuggucuauuugacacaccuccauucuauucaaauagcacaaauucguuuagaaauaccgucgaaggauauagcgauccaaccggaaaauaugauccagcagucagauccuuacauaaucuagcacaccuuuuucuaaaugguacaggaggacaaacccaucucucaccaaaugacccaauauuuguauuacuacacacauuuacagaugccguauucgaugaauggcucagaagauacaaugcagauaucucaacauucccacuagaaaacgcaccaauaggccauaauagacaauauaacaugguuccuuuuuggccaccaguaacaaauacagaaauguuuguaacugcaccagauaaucuagguuacacauaugaaauacaauggcccucaagagaauuuuccguaccagaaauaaucgcgauagcaguaguuggagcacuacuacuaguagcuuuaauuuucggaacagcaucauaucuaauaagagcaagacguucaauggaugaagcaaaucaaccauuauuaacagaucaauaccaauguuaugcggaagaauaugaaaaacuacaaaacccaaaucaauccguuguauaa

SEQ ID NO: 4026 - RNA, 1560 nt, Artificial Sequence
  AAA20870 variant
augucaccauuaugguggggauuuuuacuaucaugcuuagguugcaaaauacuuccuggcgcacaaggacaauuuccaagaguauguaugacuguagauucacuaguuaauaaagaaugcuguccaagauuaggagccgaauccgccaaugucuguggaucccaacaagguagaggacaauguacagaaguucgugcugauacaagaccauggaguggaccauauauauuaagaaaucaagaugacagggaauuauggccaagaaaauuuuuucacagaacuuguaaauguacaggaaauuuugcaggauauaauuguggugauuguaaauuuggauggacaggaccaaauugugaacguaaaaaaccaccaguaauaagacaaaauauucauaguuuaucaccucaagaaagagaacaauuucuaggagcucuagauuuagcaaaaaaaagaguucacccagauuauguaauaaccacucaacauuggcuaggcuuauuagguccaaauggaacccaaccacaauucgcuaacuguucaguuuaugacuuuuuuguauggcuucauuauuauucgguuagggauacuuuauuaggaccaggacgaccauauagagccauagacuucucacaccaaggcccagcauuuguaacauggcaucgauaucaucuccuuuguuuagaaagagaccuacaaagauuaauaggaaaugaaucauucgcauuaccauauuggaauuuugcaacaggacgaaaugaaugcgaugucuguacagaucaauuauuuggagcagcaagaccagacgacccaacacucauaucaagaaauucuagauuuucaucaugggaaacaguaugcgacucauuagaugauuauaaucaucuaguaacacuauguaacggcacuuaugaaggacuucuaagaagaaaucaaauggguagaaauagcaugaaacuaccaacauuaaaagacauccgcgauuguuuaucuuuacaaaaauucgauaauccaccauucuuccaaaauucuacauuuucauuuagaaacgcauuagaagguuuugacaaagcagaugguacauuagauucucaagucaugucccuacauaaucuaguacacucauuucuaaacggaacaaaugcccuuccacauucagcagcaaaugauccaauauuuguuguauuacacucauuuacugacgcaaucuucgaugaauggaugaaacguuuuaacccacccgcagaugcauggccacaagaacuagcaccuauaggucauaaucgaauguacaacaugguaccauuuuucccaccuguaacuaaugaagaauuauuuuuaacuucagaccaauuaggauauucauaugccauugaccuaccaguuucaguugaagaaacacccggauggccaacaacauuacucguuguaaugggaacauuaguagcauuagucggccuauuuguauuacuggcauuccuacaauaccgaagauuaagaaaaggauacaccccauuaauggaaacacaucuaucaucaaaaagauauacagaagaagcauaa

SEQ ID NO: 4027 - RNA, 456 nt, Artificial Sequence
  CCDS7679.1 variant
augagaagacuacuauuaguaacaucauuaguaguaguacuacuaugggaagcaggcgcaguaccagcaccaaaaguaccaauaaaaaugcaaguaaaacacuggccaucagaacaagacccagaaaaagcauggggagcaagagucguagaaccaccagaaaaagacgaccaauuaguaguacuauucccaguacaaaaaccaaaacuacuaacaacagaagaaaaaccaagaggacaaggaagaggaccaauacuaccaggaacaaaagcauggauggaaacagaagacacacuaggacacguauuaucaccagaaccagaccacgacucacuauaccacccaccaccagaagaagaccaaggagaagaaagaccaagacuauggguaaugccaaaccaccaaguacuacuaggaccagaagaagaccaagaccacauauaccacccacaauaa

SEQ ID NO: 4028 - RNA, 525 nt, Artificial Sequence
  ACF47598 variant
augguaucauacugggacacaggaguacuauuaugcgcccuacuaucaugccuauuacuaacaggaucauccucaggaucaaaauuaaaagacccagaauuaucacuaaaaggaacccaacacauaaugcaagcaggacaaacauuacacuuacaaugcagaggagaagcagcacacaaauggucacuaccagaaauggucucaaaagaaucagaaagacuaucaauaacaaaaucagcaugcggaagaaacggaaaacaauucugcucaacacuaacacuaaacacagcacaagcaaaccacacaggauucuacucaugcaaauaccuagcaguaccaacaucaaaaaaaaaagaaacagaaucagcaauauacauauucauaucagacacaggaagaccauucguagaaauguacucagaaauaccagaaaucauacacaugacagaaggaagagaauuaguaauaccaugcagaguaacaucaccaaacauaacaguaacacuaaaaaaaaaaaaagcauaa

SEQ ID NO: 4029 - RNA, 750 nt, Artificial Sequence
  BAR92607 variant
augggaucagacguacgcgauuuaaacgccuuauuaccagcaguaccaucacuaggaggaggaggaggaugcgcucuaccaguaucaggagcugcacaaugggcaccaguacuagauuuugcaccaccaggugcuucugcauacgguucauuaggcggaccagcaccaccaccagcaccaccaccaccaccaccaccaccaccacauuccuuuaucaaacaagaaccaucauggggaggagcugaaccacacgaagaacaaugcuuaucagcauuuacaguacauuucucaggacaauucacaggaacagcaggagcauguagauauggaccauuuggaccaccaccaccaucucaagcaucuuccggacaagcaagaauguucccaaacgcaccauaucuaccaucauguuuagaaucacaaccugcuauuagaaaccaaggauauucaacaguaacauucgacggaacaccaucauacggacacacacccucacaccaugccgcacaauuuccaaaucauucauucaaacacgaagauccaaugggacaacaaggaucuuuaggagaacaacaauauucaguaccaccaccaguuuacggaugucauacaccaacagauuccuguacaggaucucaagcauuacuuuuaagaacacccuacucaucagacaauuuauaucaaaugacaucacaauuagaauguaugacauggaaucaaaugaaccuuggugcaacacuaaaagguuaa

SEQ ID NO: 4030 - RNA, 1350 nt, Artificial Sequence
  AAA61299 variant
augggaucagacguucgugacuuaaaugcuuuacuaccagcaguaccaagucuaggcgguggaggaggaugcgcgcuaccaguauccggagcagcacaaugggcaccaguauuagauuuugcaccaccuggagccuccgcauacgguagcuuaggcggaccagccccaccaccagcaccaccuccaccacccccuccaccuccacauucauuuauaaaacaagaaccaaguugggguggagcagaaccacaugaagaacaaugucuaucagcauuuacuguccauuuuucaggacaauuuacaggcacugcaggagcauguagauacggaccauuugguccaccaccaccaucacaagcuucuucgggacaagcaagaauguuuccaaaugcuccauacuuaccaucgugucuagaaucccaaccagcaauuagaaaucaaggcuauucaacuguaacauuugacggcacaccaucauacggacauacaccaucacaucaugcagcacaauucccaaaccauuccuuuaaacacgaggauccaaugggacaacaagguucauuaggagaacaacaauauucuguucccccacccguauaugguugucauacaccaacugauucauguacaggcucucaagcuuuauuauuacgaacaccauauucaucagacaaccuauaccaaaugacaagucaauuagaaugcaugacauggaaucaaaugaauuuaggagcaacuuuaaaaggugucgcagcaggaucaagcucaucaguuaaauggacagaaggacaaucaaaccauucuacagguuaugaaucugauaaucacacuacaccgauuuuauguggugcucaauacagaauacacacacacggaguuuuuagaggaauacaagauguacgucguguaccaggcguagccccaacacuaguacgcucagcaagugaaacaucagaaaaaagaccauuuaugugugcauauccuggauguaauaaacgauacuuuaaacuaagccaccuacaaaugcauucacgaaaacacacaggcgaaaaaccauaucaaugugacuuuaaagauugcgaaagacgauuuucacgcucagaccaauuaaaaagacaucaacgacggcauacaggaguaaaacccuuucaauguaaaaccugucaacguaaauuuuccagaucagaccacuuaaaaacacacacaagaacacacacaggaaaaacaucagaaaaaccauucucauguagauggccauccugucaaaaaaaauucgcacgaagugaugaacuaguaagacaccauaauaugcaucaaagaaauaugacaaaauuacaacuagcacuauaa

SEQ ID NO: 4031 - RNA, 279 nt, Artificial Sequence
  AAA63269 variant
augcaaagaagaggacaaccauuagaaaaccacguagcacuaauacacuggcaaucagcaggaauaccagcaucaaaaguacacaacuacugcaacaugaaaaaaucaagacuaggaagaucaagagcaguaagaauaucacaaccacuacuaucaccaagaagaugcccauuacaccuaacagaaagaggagcaggacuacuacaaccacaaccacaaggaccaguaagaacaccaggaccaccaucaggaucacacccagcagcagcagacaacuaa

SEQ ID NO: 4032 - RNA, 246 nt, Artificial Sequence
  AAP35763 variant
auggaaucaccaaaaaaaaaaaaccaacaacuaaaaguaggaauacuacaccuaggaagcagacaaaaaaaaauaagaauacaacuaagaagccaaugcgcaacauggaaaguaauaugcaaaagcugcauaucacaaacaccaggaauaaaccuagaccuaggaagcggaguaaaaguaaaaauaauaccaaaagaagaacacugcaaaaugccagaagcaggagaagaacaaccacaaguauaa

SEQ ID NO: 4033 - RNA, 1098 nt, Artificial Sequence
  AAA59652 variant
auggcaguaauggccccacguacccuauuacuccuacucagcggagcccucgcacucacacaaaccugggccggaucacacagcaugcgcuacuucuucaccagcguauccagacccggacgcggagaaccccgauucauagcaguuggcuacgucgacgacacacaguucguaagauucgacucagacgcagccagccagaaaauggaacccagagccccguggaucgaacaagaagggcccgaauacugggaccaagaaaccagaaacaugaaagcccacucccaaacagaccgcgccaaccucggcacccucagaggauacuacaaccaaagcgaagacggaagccacaccauacaaaucauguacgguugcgacgucggucccgacggccgauuccucagaggcuacagacaagacgccuacgacgggaaagacuacaucgcccucaacgaagaccuccguuccuggaccgcagcagacauggccgcccaaauaacaaaacgcaaaugggaagccgugcacgcagccgaacaaaggcgaguauaccucgaaggacgcugcgucgacggccucagaagauaccuagaaaauggcaaagaaacacuccaaagaacagacccaccaaaaacccacaugacccaccaccccauaagcgaccacgaagccacacuccgaugcugggcccuaggauucuacccagcagaaauaacacuaacauggcaaagggacggcgaagaccaaacacaagacaccgaacucguagaaacccgccccgccggcgacggcacauuccaaaaaugggcagcggucgucgucccaagcggagaagaacaaagauacacaugccacguccaacacgaaggacuacccaaaccccuaacccuacgaugggaacuaagcucgcaacccacaaucccaauagucggcauaauagccggccucguacuccugggugcagucauaaccggagcaguagucgccgcggucauguggcgaagaaaaagcuccgaccgcaaaggcgggagcuacacccaagcagcgagcagcgacucagcccaaggcucggacgucagccucaccgccugcaaagucuaa

SEQ ID NO: 4034 - RNA, 1098 nt, Artificial Sequence
  AAA59606 variant
auggcagucauggccccacgcacacucguccuacugcucuccggagcccucgcacucacgcaaacaugggcaggcucacacuccaugagguacuucuucaccagcgucagcagacccggccgaggcgaaccacgcuucaucgccgucggcuacguagacgacacccaauucgugcgcuucgacucagacgcagcaucacaaaggauggaaccccgagcaccauggauagaacaagaaggacccgaauacugggacggagaaacacgaaaagucaaagcccacagccaaacccacagaguagaccucggaacacucaggggcuacuacaaucaaucagaagcaggcucacacaccguccaacggauguacggaugcgacguaggaagcgacuggcgauuccuacgcggauaccaccaauacgccuacgacggaaaagacuacaucgcccuaaaagaagaccuacgcuccuggacagccgccgacauggccgcccaaaccaccaagcacaaaugggaagcagcacacgucgccgaacaacuacgcgcguaccucgaaggcacaugcgucgaauggcuacgaagauaccuagaaaacggcaaagaaacacuacaaagaacagacgcgcccaaaacccacaugacccaccacgccgugagcgaccacgaagcaacgcuccgcugcugggcccucagcuucuacccagccgaaaucacccuaacauggcagagagacggagaagaccaaacccaagacaccgagcuagucgaaacccgaccugccggcgacggcacguuccaaaaaugggccgccguuguggucccaagcggacaagaacaaagauacacgugccacguccaacacgaaggccugcccaaaccccucacccuccgcugggaaccaagcucccaacccaccauacccaucguaggcaucauagccggccucguacucuucggcgcuguaauaaccggagccguagucgccgccgugauguggcgccgaaaaucaagcgaccgcaaaggcggcuccuacagucaagccgccagcucagacucggcccaaggcucagacguaagccugacagcaugcaaaguauaa

SEQ ID NO: 4035 - RNA, 1263 nt, Artificial Sequence
  AAH37161 variant
augcccggcggaugcucccguggaccagcagcaggcgacggccgccuacgacucgcccgccuugcccuaguccuccucggcuggguuucaucuuccucacccacaucuucagccuccucauucuccucauccgcaccuuuccuagcgucagccguauccgcucaaccaccacuaccagaccaaugccccgcccucugcgaaugcuccgaagcagcacgaaccguaaaaugugucaaccgaaaccucacagaaguucccaccgaccucccagcauacguccgaaaccucuuccucaccggcaaccaacuagcaguccuccccgccggcgccuucgcccggcgaccuccccucgccgaacucgccgcucuaaaccuaucaggaucccgacuugacgaaguccgcgcaggcgcauucgaacaccuacccucccuccgccaacucgaccucucacacaacccacucgccgaccucucacccuucgccuucucuggcuccaacgccuccgucuccgcccccucuccccuagucgaacucauccucaaccacauagucccucccgaagacgaacgccaaaaccgcagcuuugaaggcaugguugucgccgcacuccucgccggacgcgcgcuccaaggacuacgacgccucgagcucgcauccaaccauuuccucuaccucccacgagauguccuagcacaacucccaucccuucgccaccuagaccucuccaacaacucccuaguaucacuaacauacgucuccuuccgcaaccucacccaccuagaaucccuccacuuagaagacaaugcacucaaaguccuccacaacggcacacucgcagaacuccaaggccucccacacauccgcgucuuccuugauaacaaccccuggguaugcgacugucacauggccgacauggucaccuggcucaaagaaacagaaguaguccaaggcaaagacagacucacuugugcauacccagaaaaaaugcgcaaccgcguacuccucgaacucaacucagccgaccucgacugcgaccccauacucccaccuucccuccaaaccucauacgucuuccucggcaucguccucgcacucaucggcgccaucuuccuccucguacuuuaucuaaaccgcaaaggaaucaaaaaauggaugcacaacauccgcgacgccugccgugaccacauggaaggauaccacuaccgauacgaaauaaacgcugacccucgacuaaccaaccucuccuccaacucagaugucuaa

SEQ ID NO: 4036 - RNA, 1632 nt, Artificial Sequence
  AAH33010 variant
augcgcaaacccgccgcaggauuccuccccuccuuacucaaaguucuccuacucccgcuagcccccgccgcugcccaggacuccacccaagcaucaacaccaggaucccccuuguccccuaccgaauacgaacgauuuuucgcacuccucacacccaccuggaaggcagaaacaacaugccgccuacgcgccacccacggaugccgaaaccccacucucguucaacucgaccaauacgaaaaccacggccuagucccagacggagcaguuugcuccaaccugcccuacgccucaugguuugaaucuuucugccaauucacccauuaccgaugcagcaaccacgucuacuacgcaaaacgaguacucuguucacaacccguuuccauccuaucaccaaacacacuuaaagaaaucgaagcuagcgccgaaguauccccaacuacaaugacaucccccaucagcccccacuucaccgucacggaacgacaaaccuuccaaccauggccagaacgccuuuccaacaacguggaagaacuacuacaauccucccucucacucggcggccaagaacaagcgcccgaacacaaacaagaacaaggcgucgaacacagacaagaacccacacaagaacacaagcaagaagaaggacaaaaacaagaggagcaagaagaagaacaagaagaggaaggaaaacaagaagagggacaaggaaccaaggaaggccgagaagccgucucccaacugcaaaccgacuccgaacccaaauuccacuccgaaucccucucaucaaaccccagcagcuucgcaccccgaguccgugaagucgaaagcaccccaaugauaauggagaacauccaagaacuaauacgcucagcccaggaaaucgacgaaaugaacgaaauauacgacgaaaacuccuacuggcgcaaccaaaacccugguagccuucuccagcucccccacacggaagcgcuccucguccuaugcuacuccaucgucgaaaauaccugcaucaucacacccacugccaaagccuggaaauacauggaagaagaaauauuaggauuuggcaaauccgucugugauucccucggaagacgccacauguccacuugcgcccuuugcgacuucugcucccuaaaacucgaacaaugccacagcgaagcaucccuccagcgccaacaaugugacaccagccacaaaacccccuuuguauccccacugcuagccagccaaagccuuuccaucggcaaccaagucggcucaccagaaagcggccgauucuacggacucgaccuguacggcggccuccacauggacuucuggugcgcucgucuggccaccaaaggaugcgaagacguacgcguaagcggcuggcuccaaaccgaguuccucuccuuccaagacggagauuucccaaccaaaaucugcgacaccgacuacauacaauacccuaacuacugcuccuucaaaucccaacagugccuaaugcgcaaccgcaaccgcaaagucucccguaugcgcugccuucaaaacgaaaccuacuccgcccucuccccaggcaaauccgaagacguaguccucagauggucacaagaguucuccacacucacccucggacaauucggcuaa

SEQ ID NO: 4037 - RNA, 1830 nt, Artificial Sequence
  AAB58754 variant
augaaauggguagaaucgauauuccucaucuuccuccucaacuucaccgaaucacguacccuacaucggaacgaauaugguaucgcauccauacuagacagcuaccaaugcaccgccgaaaucagccuagccgaccucgccacaaucuucuucgcccaauucguccaagaagccacauacaaagagguaucaaagauggucaaagacgcccuaaccgccauagaaaaacccacaggagacgaacaauccucuggcugccucgagaaccaacuacccgccuuccuagaagaacugugccacgaaaaagaaauccucgaaaaguacggacacucagacugcugcucgcaauccgaagaaggacgacacaacugcuuccucgcucacaagaaacccacacccgccuccaucccccucuuccaagucccagaaccugucaccuccugcgaagccuacgaagaagaccgagaaacauucaugaacaaauucauauacgaaaucgcacgacgucaccccuuccuauacgccccaaccauucuccucugggcagcccgcuacgauaaaaucauccccagcugcugcaaggccgaaaacgccguagaaugcuuccaaacaaaagcagccaccgugacaaaagaacugcgcgagagcucccuccucaaccaacacgccugcgcagucaugaaaaacuucggcacccguaccuuccaggccauaacagucaccaagcucucacagaaguucaccaaagucaacuuuacagaaauacaaaagcuaguucucgacgucgcccacguccacgaacacugcugcagaggcgacguccucgacugccuccaagacggcgagaaaaucaugagcuacaucugcucacagcaagacacccuuuccaacaaaaucaccgaaugcugcaagcucacaacccuagaacgcggucaaugcaucauccacgcagaaaacgacgaaaaacccgaaggccugucaccuaaccucaaccgcuuccucggcgaccgagacuucaaccaguucagcuccggagagaaaaacaucuuccucgccuccuucguccacgaauacucccgccgacacccccaacucgccguaucagucauccuacgcguagcgaaaggcuaccaggaacuccuagaaaaaugcuuccaaacagaaaacccccucgaaugccaagacaaaggagaggaagaacuacaaaaauacauccaagaaucccaagcccuagcuaaacgaucaugcggacuuuuccagaaacuuggcgaauacuaccuacaaaacgcauuccuagucgccuacacaaagaaagcaccccagcugaccagcucagagcuaauggccauaacccgcaaaauggccgccacagccgccacaugcugccaacuaucugaagacaaacuccucgccugcggagaaggcgccgcugacaucaucaucggccacuugugcauccgccacgaaaugacacccgucaaccccggcgucggccaaugcugcaccuccagcuacgcaaaccgacgccccugcuucuccucgcucgucguagacgaaaccuacguacccccugcauucucagacgacaaauucauauuccacaaagaccuuugccaagcccagggcguugcccuccaaaccaugaaacaagaguuccucauuaaccucgucaaacaaaaaccccaaauaaccgaagaacaacuagaagccguaauagcagacuucagcggccuacucgagaaaugcugucagggccaagaacaagaagucugcuucgcagaagaaggacaaaaacuuaucucaaaaacacgcgccgcccuaggcgucuaa

SEQ ID NO: 4038 - RNA, 2565 nt, Artificial Sequence
  AAI26251 variant
augauggccuacagcgacacaacgaugaugagcgacgacaucgacuggcuacgcucacacagagggguaugcaagguggaccuauacaacccagaaggacagcaggaccaagaccgcaaagucaucugcuucguagacgucaguacucucaacguagaagacaaagauuacaaagacgccgcauccucaagcucugaaggcaaccuuaacuuaggcagccuggaagaaaaagaaaucauagucauuaaagacacugagaaaaaggaccaauccaaaaccgaagguuccgucugccuauucaaacaagcccccuccgaccccguaucaguccucaacuggcuccuauccgaccuacaaaaauacgcgcucggcuuccagcacgcacucuccccaucaacaaguaccugcaagcacaaaguaggcgauaccgaaggcgaauaccaccgcgcaucaagcgaaaacugcuauucagucuacgcagaccaaguaaacaucgacuaccucaugaacaggccccaaaaccuccgccucgaaaugacagcagccaaaaacacaaacaacaaccaaagcccaucagcgccacccgcgaaaccuccaaguacccagcgagccguaauaagcccggacggcgaaugcuccauagacgaccuaucguucuacguuaauagacuauccagccuaguaauccaaauggcacacaaagaaauuaaggaaaaacucgaagggaagucgaaaugccuccaccacucaaucugcccaagccccggaaacaaagaacgaaucucccccaggaccccagccagcaaaaucgccagcgaaauggcuuacgaagccgucgaacugaccgccgcggagaugcggggaacaggagaagaauccagagaaggaggccaaaaguccuuccucuacagcgaacucagcaacaaaagcaaauccggcgacaaacaaaugucacagagagaaucuaaagaguucgccgacagcaucucaaaggggcucauggucuacgccaaccaaguagccuccgacaugaugguaucccucaugaagacacucaaaguacacagcucaggaaagccaaucccagccucugucguacucaagcguguacuccuacgccacacaaaggaaaucgucagcgaccuaauagacagcugcaugaaaaaccuucacaacaucacgggcguacuaaugacggacagcgacuucgucagugccguaaagcgaaaccucuucaaccaauggaaacaaaacgcaacugacaucauggaagccaugcucaaacggcuagucuccgcgcucaucggcgaagagaaggaaacuaaaucccagagucugucguacgcaucccuaaaagccggcagccacgaccccaaaugcagaaaccaaucccuagaguucagcaccaugaaggcggaaaugaaagaacgcgacaaggggaaaaugaaaagcgaccccugcaaaucccuuacaagcgcagaaaaaguaggagaacacauacugaaagaagggcuaacaaucuggaaccaaaagcaaggcaacagcugcaagguggccacaaaagccugcuccaacaaggacgaaaaaggggagaaaauaaacgcguccacugacucccuagcaaaagaccuuaucgucucagcgcucaaauuaauccaauaccaccuaacccagcaaacaaaaggaaaagacacaugcgaagaagauugccccggauccacaaugggauacauggcccaaagcacccaauacgaaaagugcggcggaggccaaucagcaaaagcacucagcgucaaacagcuagaaagucacagagcaccuggcccuucaaccugccagaaagaaaaccagcaccuggacagccagaaaauggacaugucaaacauuguccuaaugcuaauacaaaaauuacucaacgaaaaccccuucaaaugcgaggauccuugcgaaggcgagaacaaaugcucagagccccgcgcaagcaaagcagcauccaugagcaaccgcagcgacaaagcagaagaacaaugccaagaacaccaagaacucgacugcaccucaggcaugaagcaagccaacggacaauucauagacaagcuaguagaaucagucaugaaacucugccucauaauggcaaaauacagcaacgacggcgcggcacucgcagaacucgaagaacaagcugccucggcgaacaagccgaauuuccgaggcacacgcugcauacacagcggagccaugccccagaacuaccaagacucccugggccacgaagucauagugaacaaccagugcucaaccaacagccuccaaaaacaacuccaagcaguccuacaauggauagcagccagccaauucaacguccccaugcuauacuucaugggcgacaaggacggacaacuggagaaacucccccaagucagcgccaaagccgccgaaaagggcuacucagucgguggacuccugcaagaagucaugaaguucgccaaagaacgacaaccagacgaggcggucggaaaagucgcacgcaaacaacuacuagacuggcuacuggccaaccuauag

SEQ ID NO: 4039 - RNA, 1251 nt, Artificial Sequence
  BAG61782 variant
auggucgacuaccacgccgccaaccaaagcuaccaauacggccccucaagcgcaggcaacggcgcaggcggcggaggcuccaugggcgacuacauggcccaagaagacgacugggacagagaccuccuccucgaccccgccugggagaaacaacaacgcaaaaccuucaccgcauggugcaacagccaccuacgaaaagccggcacccaaaucgaaaacauagacgaagacuuccgcgacggacuaaaacucaugcuccucuuggaagucaucuccggcgagcgccuaccaaagcccgaacgcggcaaaaugcgaguacacaaaauaaacaacgucaacaaagcccucgacuucaucgccucaaaaggcgucaagcucgucuccaucggcgccgaagaaauaguagacggcaacgccaaaaugacccucggcaugaucuggaccauaauccugcgguucgcgauacaagacaucagcgucgaagagaccucggccaaagaaggccuccuacucuggugccaacgaaagaccgcccccuacaaaaacgucaacguccaaaacuuccacauaucauggaaagacggacuagccuucaacgcacucauacaccgccacagaccagagcucauagaauacgacaaacuacgaaaagacgaccccgucacaaaccuaaacaacgccuucgaagucgccgaaaaauaccuagacauccccaaaaugcucgacgccgaagacaucgucaacacagcacgccccgacgaaaaagcaaucaugacauacguauccuccuucuaccaugccuucagcggagcccaaaaagcagaaacugcagccaaccgaauaugcaaaguccucgccguaaaucaagaaaacgaacaccuuauggaagacuacgaaaaacuagccuccgaccuacucgaauggauccgacgcaccauaccauggcucgaagaccgcguaccucaaaagaccauccaagaaaugcaacaaaaacucgaagacuuccgagacuaccgacgaguccacaaaccgcccaaaguccaagaaaaaugccaacuggaaaucaacuucaacacacuccaaacaaaacuccgccucucaaaccgacccgccuucaugccuucguggcgaucaagagcaucauccucccccaccagcacaugcgcagcauccuccccugcccgccccaugcuauggggccccggaagccgcccucgauggcgacgcucaggcgccagcccccuaagauaa

SEQ ID NO: 4040 - RNA, 1689 nt, Artificial Sequence
  BAG65349 variant
augguagacuaccacgccgccaaccaaagcuaccaauacggaccaucaagcgccggcaacggcgcgggcgguggaggguccaugggcgacuauauggcgcaagaagaugacugggacagagaccuccuccucgauccagccugggaaaagcaacaacgaaaaacauucaccgcauggugcaacucacaccuaagaaaagccggaacacaaaucgaaaacauagacgaagacuucagggacgggcuaaaacuaaugcuccuccucgaagucaucagcggcgaacgccugccuaaacccgaacgcggcaaaaugcgaguccacaaaauuaacaacgucaacaaagcccuagacuucaucgcauccaaaggaguaaaacucguauccaucggagccgaggaaauaguagauggcaacgccaaaaugacccugggcaugaucuggaccauaauacucagguucgcaauccaagacaucucagucgaggaaaccucagcuaaagaaggacuccuacucuggugccaacgcaaaaccgcgccuuacaaaaacguaaacguccaaaacuuccacaucagcuggaaagacggccuagcauucaacgcacuaauacacagacaccgaccugaacuaauagaauacgauaagcuccguaaagacgacccagucaccaaccucaacaacgccuucgaggucgccgaaaaauaccucgacauaccaaagaugcucgacgccgaagacaucgucaacaccgccagacccgacgaaaaagccauaaugaccuacguuucuagcuucuaccacgcguucucaggcgcccaaaaagccgaaaccgccgcgaacagaaucugcaaaguccuagccgucaaccaagaaaacgagcaccucauggaagacuacgaaaaacucgccagcgaccuacucgaauggauccaacgcaccauaccauggcucgaagaccgcgucccacaaaaagccauccaagaaaugcaacaaaagcuagaagauuuccgcgauuaccgcagaguacacaaaccaccaaaagugcaggaaaaaugccagcuagaaauaaacuucaacacacuccaaacaaaacuccgacuuagcaaccggcccgcguucaugccaagcgaaggaaaaauggugucggacaucaacaacggauggcagcaccucgaacaagccgaaaagggcuacgaagaguggcuacucaacgaaauacgccgccuagaacgacucgaccaccuagcagaaaaguuccgccaaaaagccagcauccacgaagcauggaccgacggcaaagaagccaugcucaaacaccgagacuacgaaacagcaacccucagcgacaucaaagcacucauccgcaaacacgaagcauucgaauccgaccuagcagcccaccaagacagaguagaacagauagcagcaauagcccaggaacugaacgaacucgauuacuacgacagccauaacgucaauaccccggacgggcuucaagaaggccccggccaaccccacucacccauacccccacuaugcaucuacgcaaaacacucacuacaauccucgggcguaggaggaugggccgggagaggguggggcagacucagcccccuaucccuauguggccucgcccgacgauucccacgacccggauggggcgaccuugggccugcacuccucgucugguaa

SEQ ID NO: 4041 - RNA, 2736 nt, Artificial Sequence
  AAH05033 variant
auggucgauuaccacgcagcaaaccaauccuaccaguacgggccgucaucagccggcaacggagcagggggagggggcaguaugggcgacuacauggcccaggaagaugacugggaccgcgaccuacuucuagaccccgccugggaaaaacagcaacgcaagaccuuuaccgcauggugcaacucccaccuacgcaaagcaggcacacaaaucgaaaacauagacgaggacuuccgcgacggucucaaacugaugcuccuacuagaggucaucuccggagaacgccugccgaagccggaacgagggaagaugcgcguccacaaaauaaacaaugugaauaaagcccucgacuucaucgccucgaagggcguuaagcuagucucaaucggagcggaagaaaucgucgacggcaacgccaaaaugacucucggcaugaucuggaccaucauacucagauucgccauccaagacauaagcguagaagagacauccgccaaagaggggcuccuccuauggugccagcgcaaaacagcacccuacaaaaacgucaacguccaaaacuuccacauaucuuggaaagacggccucgcauucaacgcacuaauacacagacacagacccgagcucauagaauacgauaaacuaagaaaagacgaucccgugaccaaccucaacaacgcauucgaaguggcagaaaaauaccuagacaucccuaaaaugcucgacgcugaagacauuguaaauacagcgcgacccgacgagaaagccauaaugacauacguaucgucguucuaccacgccuuuuccggcgcucaaaaggcggaaaccgcugcgaacagaauauguaagguccucgcaguaaaccaggaaaacgagcaccugauggaagauuacgaaaaacucgcaagcgaccuacucgaauggauacgacgcaccauaccauggcuugaagaccgcguaccacagaaaacgauccaagaaaugcaacaaaaacucgaagacuucagagacuaccgcagaguccacaaaccuccaaagguccaagaaaagugccaacucgaaaucaacuucaacaccuuacaaacaaaacuccgccuauccaaccgacccgccuuuaugccuucugaagggaaaaugguguccgacauaaacaacggcuggcaacaccuagaacaggcggaaaaaggauacgaagaguggcuucucaacgaaaucagacggcucgaacgccuggaccaccuagccgaaaaguuccgccaaaaagccagcauccacgaagccuggaccgacgggaaagaagccaugcucaaacacagagauuacgaaacagccacccuaagcgacauuaaagcacucauccgcaaacacgaggccuucgaaagugaccucgccgcccaucaagaccgaguagagcagaucgccgccauagcacaggagcuaaacgaacucgacuacuacgacagucacaaugugaacacccgcugccagaaaaucugcgaccaaugggacgcacucggcucacucacucacagccggcgggaagccuuggagaaaaccgaaaaacagcuugaagccauagaccagcuccaccucgaauacgcaaaacgagcagcccccuuuaacaacuggauggaauccgccauggaagaccuccaagacauguucaucguacacaccauagaggaaaucgaaggccuaaucuccgcacaugaucaauucaagagcacccuacccgacgcagaucgcgaacgagaagccauccucgccauacacaaagaagcacaacgcaucgccgaaucaaaccacaucaaacuauccggauccaacccguacaccacagucacaccccaaauaauaaacagcaaaugggaaaaaguccaacaauuaguccccaagcgagaccacgcgcuccucgaagaacagucgaagcaacaaucgaacgagcaccuccgccgccaauucgccucacaggcuaacgucgucggccccuggauccaaaccaaaauggaagaaaucggccggauuuccaucgaaaugaacggcacacuagaagaccaacucucacaccucaaacaauacgaacgaaguauaguagacuacaaacccaaccucgaccuccucgagcaacagcaccaacuaauccaggaagcacucaucuucgacaacaaacacacuaacuauaccauggagcacauacgaguaggcugggaacaacuccuaaccacuauagcgagaaccaucaacgaagucgagaaccaaauacuaacccgugacgccaaaggaaucagccaggaacaaaugcaagaguuccgcgccuccuucaaccacuucgauaaagaccacgggggcgcgcucggaccagaagaguucaaagccugccuaauaucacuaggauacgacgucgaaaacgaccgccagggcgaagccgaguucaaccgcauuaugucccugguagauccaaaccacucgggacuggucaccuuccaggccuucauagauuucaugucccgagaaaccacagacaccgacacagccgaccaaguaaucgccagcuucaaaguucuagcaggagacaagaacuucaucaccgccgaagaacuccgccgugaacucccacccgaccaagcagaauacugcauagcccggauggcucccuaccaggggccggacgcgguccccggcgcacuagacuacaaaucauucucuacagcccuguacggcgaaagcgaccuauaa

SEQ ID NO: 4042 - RNA, 597 nt, Artificial Sequence
  EAX10817 variant
auggcacuccagggcauaagcgugauggagcuaucgggauuggccccgggcccguucugugccauggucuuggccgacuucggggcaagagucgugcgcguggacaggcccgggagcagguacgaugucucgcgcuugggaaggggcaagcgcucacucgugcucgaucucaagcaaccgcgcggggccgcaguccugcgcaggcucuguaaaaggagcgaugucuugcucgagcccuuucgcaggggcgugauggagaaauugcaauugggcccggaaauacuccagcgcgagaacccgcgccugaucuaugccaggcucucaggcuuuggccagagcgggagcuuuugcaggcuagcgggccaugacauaaacuaccucgcgcucucgggcgggcgcaauagcauauucaaguucuuuagcguggaaaauagcgagaucgagagcgugggaucgaccucgcgcacggaacaugucggaugguggagcacguucuuauacgaucuacaggacucgcgcuggggaauacacgggugcuggagcaaucgcacgccagugcucagggccgcggaccagcgcacguggacgaaaguauga

SEQ ID NO: 4043 - RNA, 597 nt, Artificial Sequence
  BAF85677 variant
auggcgcuccagggcauaagcguggucgagcucucgggccuggccccgggcccguucugugccaugguauuggcagauuucggggccagggucgugcgcguggacagacccgggagcagauacgaugucucacgccugggcaggggaaagcgcucgcucgugcucgaucucaagcaaccgcgcggggccgcagucuugcgcaggcucuguaaaaggagcgauguucugcucgagcccuuccgcaggggcgugauggagaaauuacaacugggaccggaaauacuccagcgcgagaacccgcgacugaucuacgccaggcucucgggcuuuggccagagcgggagcuuuugcaggcuagcgggccaugacauuaacuaucucgcgcucucgggcgggagaaauaguauauucaaguucuuuagcguggaaaauagcgagaucgaaagcgugggcucgaccucacgcacggaacauguagggugguggagcacguucuuguacgaucuccaggacucgagauggggcauacacgggugcuggagcaaucgcacgcccuuccuaagagcagcggaccagcgaacguggacgaaaguguga

SEQ ID NO: 4044 - RNA, 2763 nt, Artificial Sequence
  EAX05380 variant
auggaaguacagcuaggacuaggccgaguauacccccgcccacccucaaagaccuaccgcggagcuuuccaaaaccuguuccagagcgucagagagguaauacaaaaccccggcccccgccaccccgaagccgcaucggcugcacccccaggcgccucccuccuccuacuucagcaacaacaacaacagcaacaacaacaacaacaacaacaacagcagcaacaacaacaacaacaacaagagaccagcccccgccaacagcaacaacagcaaggcgaagauggcagcccacaagcgcaccgaagggguccaaccggauaccucguacuagacgaagaacaacaacccagccaaccccaaagcgcccucgaaugucacccagaaagaggcugcguaccagaaccaggagcagcaguugcggccuccaaaggacuaccucaacaacuacccgccccacccgaugaagacgacucggccgcacccuccacccuuagccuccuuggccccaccuuccccggccuuucauccugcagcgccgaccucaaagacauucuaucagaagccuccacgaugcaacuacugcaacaacagcaacaagaagcagucucugaagguucauccucaggcagagcacgagaagcaucaggcgccccgacauccagcaaggacaacuaccuaggcggcaccucaaccaucucagacaacgcgaaagaacuaugcaaagccguaucggucucgaugggccucggagucgaagcgcucgaacaccucucccccggugagcaacuccgaggagacugcauguacgccccacuauuagggguaccaccagcgguccgacccacccccugcgcaccccucgcagaaugcaaaggcucccuccucgacgacuccgccggcaagagcaccgaagauacugcagaauacucacccuucaagggcggcuacacaaaaggucucgaaggggaaucccuaggcuguucaggcuccgccgcagccggaagcuccggaacccuagagcuaccaucaacccucucgcucuauaaguccggugcccuggacgaagccgccgccuaccaaagccgcgacuacuacaacuucccacucgcucucgccggcccucccccacccccaccuccgccccauccccaugcacgcauaaaacucgaaaacccccucgacuacggaagcgccugggccgcagcagccgcgcaaugccguuacggagaccuagcgucacuacacggcgccggcgccgccggaccaggcucuggcuccccaucugcugcagcaagcagcucauggcacacacucuuuacagcagaagaaggacaacuauacggacccuguggcggaggcggcggaggcggaggaggcgggggcggaggcggcggagguggcggcgguggaggaggcggcgaggccggcgccgucgcaccuuacggcuacacacgacccccacaaggcuuagcaggacaagaauccgacuucacagcacccgacgucugguacccgggaggcaugguaucucgcguccccuacccaaguccgaccugcguaaaaagcgaaaugggccccuggauggacagcuacuccggaccauacggagauaugagacuugaaaccgcgagagaucacgucuugccaauagacuacuacuucccuccccagaaaaccugccuaauaugcggcgaugaagcauccggaugccacuacggcgcccucacaugcggcucauguaaagucuucuuuaaacgagcagcagaaggaaaacaaaaauaccuaugcgcaucccggaacgacugcaccaucgauaaauuccgccgcaaaaacugccccucaugccgacuacgcaaaugcuacgaagcaggaaugacacucggcgcacgaaaacuaaagaaacuaggcaaccuaaaacuacaagaagaaggagaagccagcucaaccacaucccccacggaagaaacgacacaaaaauuaaccgucucccauauagaaggcuaugaaugccaaccaaucuuucuaaauguccucgaagccauagaaccuggcguaguaugcgcaggacacgacaacaaccaacccgacagcuucgcagcauuacuguccucccuaaacgaacuuggcgaacgccagcuaguucacguggucaagugggcuaaggcgcuaccuggauuucgaaaucuacacgucgaugaccaaauggcgguaauccaauacuccuggaugggccucauggucuucgccaugggauggcguuccuucacaaacguaaacagccgcaugcuguauuucgcaccugaccucgucuucaacgaauaccgcaugcacaaaucucggauguacucccaaugcguucgcaugagacaccucucccaagaguucggguggcuccaaauaacaccccaagaguuccucugcaugaaagcccucuuacuguucuccauaaucccuguggacggauuaaagaaccaaaaguuuuucgacgaacuccgcaugaacuacauaaaagaacuugaccgaaucauagccugcaaacguaaaaauccgaccucaugcucaaggagauucuaccaacuaaccaagcugcucgacagcguccaacccaucgcacgcgaacuacaccaauucaccuuugaccuacucauaaaaucgcacauggucagcgucgacuuuccugaaaugauggccgaaauaaucagcguucaaguacccaaaauauuaaguggcaaagucaaacccauauacuuccacacacaauaa

SEQ ID NO: 4045 - RNA, 1239 nt, Artificial Sequence
  AAH64630 variant
auggcccccgucgaacacgucgucgccgacgccggagccuuccuacgucacgccgcacuacaggacaucgguaaaaacaucuacaccaucagagaagucgucaccgaaauccgagacaaagcaacccgacgacgccucgcaguacuccccuacgaacuccgauucaaagaaccccuaccagaauauguccgacucgucaccgaauucuccaaaaaaaccggcgacuaccccucacuaagcgccaccgacauccaaguacuugcccuaacauaccaacucgaagcagaauucgucggcgucagccaccucaaacaagaaccacaaaaaguuaaagucuccuccuccauacagcaccccgaaacaccucuccacauaucaggcuuccaccuccccuacaaaccaaaaccaccccaagagaccgaaaaaggccacuccgccugcgagcccgaaaaccucgaauucucaucauucauguucuggcgcaacccccuccccaacaucgaccacgaacuccaagaacuccucaucgaccgcggcgaagacguacccucagaagaagaagaagaagaagaaaacggcuucgaagaccgaaaagacgacagcgacgacgacggaggcggcuggauaacacccuccaacaucaaacaaauccaacaagagcucgaacaaugcgacguccccgaagacguacgcgugggcugccucaccacggacuucgccaugcaaaacguccuacuccaaaugggccuacacguucuugcagucaacggcaugcucauccgugaggcccgauccuacauccuccgcugccacggaugcuucaaaaccaccuccgacaugagccgagucuucugcucacacugcggcaacaaaacccucaaaaaagucuccgucaccguauccgacgacggcacccuccacaugcacuucucccguaacccaaaaguccucaacccccgcggccuccgauacucacuaccaaccccaaaagguggcaaauacgccaucaacccacaccuaaccgaagaccaacgcuucccucagcuuagacuaucccaaaaggcacgccaaaaaaccaacguauucgcccccgacuacaucgccggaguauccccauucgucgaaaacgacaucucaucccgaucugcaacccuccaaguccgagacucaacccucggcgccggacgacgacgacucaacccaaacgcaucacgcaaaaaauucgucaaaaaacgcuga

SEQ ID NO: 4046 - RNA, 984 nt, Artificial Sequence
  AAH69102 variant
augcaaaugcccgccaugaugucacuccuccucgucuccgucggccucauggaggcacuccaagcgcaaucccaccccaucacacgccgcgaccuauucucccaagaaauccaacucgacauggcccucgcaucauucgacgaccaauacgccggcugcgccgccgccaugaccgccgcccucccugaccuaaaccacaccgaauuccaagccaaccaagucuacgccgacuccuggacccucgccuccucccaauggcaagaacgacaagcccgcuggcccgaauggucccucuccccuacucgccccucucccccuccccucggcuuccgcgacgaacacggcgucgcccuccucgccuacaccgccaauucaccccuccacaaagaauucaacgcagccguccgcgaagccggccgcucccgcgcccauuaccuacaccacuucuccuucaaaacccuccacuuccuacucaccgaagcccuacaacuacuaggcuccggacaacgccccccccgcugccaccaagucuuccgcgguguccauggccuucgcuuccgacccgcaggcccacgcgcaacuguccgccucggcggauucgccuccgccucccucaaacacguugccgcccaacaauucggcgaagauaccuucuucggcaucuggaccugccucggcgcccccaucaaaggcuacuccuucuuccccggcgaagaagaaguccuaaucccuccauucgaaaccuuccaagucaucaacgccucccgccuagcucaaggccccgcccgcaucuaccuccgcgcccuaggaaaacacuccaccuacaacugcgaauacaucaaagacaaaaaaugcaaaucaggccccugucaccucgacaacucugccaugggccaauccccacucuccgccguauggucccuacuccuucuccucugguuccuagucguacgcgccuuucccgacggccccggccuccuuuaa

SEQ ID NO: 4047 - RNA, 1035 nt, Artificial Sequence
  AAH09751 variant
auggcccaaaaagaaaacuccuaccccuggcccuacggccgccaaacugcccccucgggccucagcacccucccccaacgcguacuucgcaaagaacccgucacccccuccgcacuaguccucaugucccgcagcaacguccaacccacagcagcccccggccaaaaagucauggaaaacuccuccggcacccccgacauccuaacccgccacuucaccaucgacgacuucgaaaucggccgcccccucggcaaaggcaaauucggcaacgucuaucucgcccgcgaaaaaaaaucacacuucaucgucgcccuaaaagucuuauucaaaucccaaaucgagaaagaaggcguagaacaccaacuccgccgagaaauagaaauacaagcacaccuccaccaccccaacauccuccgccucuacaacuacuucuacgaccgccgccgcaucuaccucauacuagaauacgccccccgcggagaacucuacaaagaacuccaaaaaucaugcaccuucgacgaacaacgcaccgcaacaaucauggaagaacucgccgacgcccuaauguacugccacggcaaaaaaguaauccaucgcgacaucaaacccgaaaaccuacucuuaggccuaaaaggcgaacuaaaaaucgccgacuucggaugguccguccacgcacccucccuccgacgcaaaaccaugugcgguacucucgacuaccuaccccccgaaaugaucgaaggccgcaugcacaacgaaaaagucgaccucuggugcauaggcguccucugcuacgaacuccucgucggaaacccccccuucgaauccgccucccacaacgaaaccuaccgccgcaucgucaaagucgaccucaaauuccccgcauccguccccaugggagcccaagaccucaucucaaaacuucuucgacacaacccaucugaacgccucccccucgcccaagucuccgcccaccccugggucagagccaacuccagacguguccucccccccucagcccuacaauccgucgccuaa

SEQ ID NO: 4048 - RNA, 360 nt, Artificial Sequence
  AAD48083 variant
augucccgcuccgucgcccucgccguccucgcccuccucucccucuccggccucgaagccauccaacgcacccccaaaauccaagucuacucccgacaccccgccgaaaacggcaaauccaacuuccucaacugcuacgucuccggcuuccaccccuccgacaucgaagucgaccuccucaaaaacggcgaacgaaucgaaaaagucgaacacuccgaccucuccuucuccaaagacugguccuucuaccuacucuacuacaccgaauucacccccaccgaaaaagacgaauacgccugccgcgucaaccacgucacccucucccaacccaaaaucgucaaaugggaccgcgacauguaa

SEQ ID NO: 4049 - RNA, 1137 nt, Artificial Sequence
  AAH28058 variant
augcgcaugcucgucuccggucgccgcgucaagaaauggcaacuaauaauccaacuauucgcaaccugcuuccucgccucccuaauguucuucugggaaccuauagacaaccacaucguaucccacaugaaaucauacuccuacagauaccucaucaacuccuacgacuucguaaacgacacacucucacucaaacacaccuccgccggaccccgcuaccaauaccucaucaaccacaaagaaaaaugccaagcccaagacguccuucuccuacucuucgucaaaaccgcccccgaaaacuacgaccgccgcuccggcauccgacgaaccuggggcaaugaaaacuacguucggucucaacuuaacgccaacaucaaaacccucuucgcacucggcacacccaacccccucgaaggcgaagaacuccagcgaaaacuagccugggaagaccagcguuacaacgacauaauccaacaagacuucgucgacagcuucuacaaccucacccuaaaacuccucaugcaauucuccugggcaaacaccuacugcccccacgccaaauuccucaugaccgccgacgacgacaucuucauccauaugcccaaccucaucgaauaccuacaaucacucgaacaaaucgguguacaagacuucuggaucggccgaguccaccgcggcgcuccacccauccgagacaaaucauccaaauacuacguguccuacgaaauguaccaauggcccgccuaccccgacuacacagccggcgccgccuacgucaucuccggcgacgucgcagccaaagucuacgaagccucccaaacccucaacuccucccucuacaucgacgaugucuucaugggccucugcgccaacaaaaucggcauagucccccaggaccacgucuucuucuccggcgaaggcaaaaccccauaccaccccugcaucuacgagaaaaugaugaccucccacggccaucucgaagaccuacaagaucucuggaaaaaugccacugacccaaaagucaaaaccaucuccaaaggcuucuucggccaaaucuacugucgccuaaugaaaaucauccuacucugcaaaaucuccuacgucgacaccuaccccugccgcgcagccuuuaucuaa

SEQ ID NO: 4050 - RNA, 1602 nt, Artificial Sequence
  AAA35516 variant
auguggcuaggccgccgugcccuuugugcccuuguacuccuacuugcaugcgcaucacuaggacuccuauacgcaagcacccgcgacgcccccggccuccgccuaccucucgccccuugggccccaccccaaucacccagacgccccgaacuacccgaucucgcccccgaaccccgcuacgcccacaucccaguacguauaaaagaacaagucgucggacuacucgcuuggaacaacugcucgugugaaucauccggcggcggacucccacuccccuuccaaaagcaaguacgagccauagaccucaccaaagccuuugacccagccgaacuccgagcagcauccgccacccgagaacaggaguuccaagccuuccucucucgcucacaaucucccgcugaccaacuccuaauugccccagccaacuccccuuuacaguacccacuccaaggcgucgaaguccaaccacuacgcuccauccucguccccggacucucccuccaagcagccuccggucaagaagucuaccaaguaaacuuaaccgccucacucggcacuugggacguagcaggcgaagucacaggcgucacacuaaccggcgaaggccaagcugaccuuacccuggucucucccggccuagaucaacucaaccgacaacuacaacucgucaccuacagcuccagauccuaccaaaccaacaccgccgacacgguaagauucuccacagaaggccacgaagccgcauucacaaucagaauaagacacccacccaacccccgccucuacccacccggcucacuaccccagggagcgcaauacaauaucucugcacucgucaccauagcuacgaaaacauuucuacgcuacgaccgacuucgcgcccuaaucacaucaauacgccgcuucuaccccacaguaaccguagucaucgccgaugacagcgacaaacccgaacgcgucucaggacccuacguagaacacuaccucaugccauucggcaaaggcugguucgcuggacguaaccuagcagucucccaagucaccacaaaauacguacuguggguagacgacgacuucgucuucacugcccgcacacgccucgaacgccuaguagacguacucgaacgaaccccacuugaccucgucggcggcgccguacgcgagauauccggcuucgccacuaccuaucgccagcuccucucaguagaacccggcgcuccaggacuaggcaacugccuccgccaaagacgaggcuuccaccacgagcuagucggcuuccccggaugcgucguaacagacggcguagucaauuucuuccucgcccguaccgacaaaguacgagaagucggauuugacccccgccuaucccgcgucgcacaccucgaguucuuccuagacggccucggaucacuacgaguaggcucaugcuccgacguggucguagaccacgccuccaaauuaaaacuacccuggacaagcagagacgccggugcggaaaccuacgcccgauacagauacccaggcucacucgacgaaucacaaauggcuaaacaccgacuccuauucuucaaacaccgcuuacaauguaugacaucccaauaa

SEQ ID NO: 4051 - RNA, 849 nt, Artificial Sequence
  AAH74729 variant
auggccucccucggccaaauccucuucugguccaucaucucaaucaucaucauccucgcaggcgccaucgcccucauaaucggcuucggaaucucgggaagacacucgaucaccgucaccaccguagcaucggccggaaacaucggugaggacggcauccugagcugcaccuucgaaccagacaucaaacucagcgacaucgucauccaauggcucaaagaaggcguccucggccucgugcacgaguucaaagaaggaaaagacgaacugagcgaacaagacgaaauguuccgaggccgaaccgcaguauucgcagaccaaguaaucguaggcaacgccucacuccgccucaaaaacgugcaacucaccgacgcagggaccuacaaaugcuacaucaucaccuccaaaggcaaggguaacgccaaccuagaauacaaaaccggcgccuucagcaugcccgaagucaacgucgacuacaacgccucgagcgaaacccuccgcugcgaagcccccagaugguucccccaacccacagucgucugggccagccaagucgaccaaggagccaacuucuccgaaguuagcaacaccucauucgaacucaacagcgagaacguaaccaugaaaguagucucaguccuauacaacguaacgaucaacaacaccuacucaugcaugaucgaaaacgacaucgccaaagccaccggcgacaucaaagucaccgaauccgaaaucaaacgccgaagccaccuucaacuccuaaacucaaaagccagccucugcguaagcucauucuucgccauaagcugggcccuccuaccacucucacccuaccucaugcucaaauaa

SEQ ID NO: 4052 - RNA, 132 nt, Artificial Sequence
  AAC50123 variant
auggccgcccgcgccgucuuccucgcccucuccgcccaacuccuccaagcccgccucaugaaagaagaaucccccgucgucuccuggcgccucgaacccgaagacggcaccgcccucugcuucaucuucuaa

SEQ ID NO: 4053 - RNA, 1158 nt, Artificial Sequence
  AAN40694 variant
auggccgccgcacucuucguccuccucggauucgcacuccuagguacacacggagccuccggagcagccggauucguccaagcaccccucagccaacaacgcugggucggcgggagcguagaacuacacugcgaagcagucggaagccccgucccagaaauacaauggugguucgaaggacaaggaccaaacgauaccugcucccaacuaugggacggcgccagacucgaccgcguacacauccacgccacauaccaccaacacgccgcaagcacaaucagcaucgacacccuagucgaagaagacacaggcacauacgagugccgcgcaagcaacgacccagaccgcaaccaccucacacgugcacccagaguaaaauggguccgcgcccaagccgucguacucguacuagaacccggcaccgucuucacaaccguagaagaccucggauccaaaauccuccucacaugcucacucaacgacucugccacagaagugaccggacaccgcuggcugaaaggcggcgucguccucaaagaagacgcacucccaggccagaaaacagaguucaaagucgacucagacgaccaauggggagaauacucaugcguauuccuacccgaaccaaugggcacggccaacauccaacuccacggcccaccccgcguaaaagcagugaaaucaucagaacacauaaacgaaggcgaaaccgccaugcuaguaugcaaaucggaauccgucccacccgucaccgacugggcaugguacaaaaucacagacagcgaagacaaagcacucaugaacggaucagaaucacgcuucuucguaagcucaucccaagggcgcuccgagcuccacaucgaaaaccuaaacauggaagcagacccaggccaauaccgaugcaacggaaccagcucaaaaggcagcgaccaagcaaucauaacacuccgcguacgaucgcacuuagccgcacucuggccauuccucggcaucguagccgagguccuaguacugguaacaauaauauucauauacgaaaaacgccgaaaaccagaagacguacucgacgacgacgacgccggcuccgcaccccuaaaaagcucgggccaacaccagaacgacaaagggaaaaacguaagacaacgaaacucgagcuaa

SEQ ID NO: 4054 - RNA, 720 nt, Artificial Sequence
  ABX60202 variant
auggcccacgccggccgcaccgguuacgacaaccgcgaaaucguaaugaaauacauccacuacaaacuaucccaacgcggcuacgaaugggacgccggcgacgucggcgccgccccccccggcgccgcccccgcccccggaaucuucuccucccaacccggccacacaccccaccccgcagccucccgcgaccccguagcccgaaccuccccacuccaaacccccgccgccccaggcgccgccgccggccccgcacuaucacccgucccccccgucguccaccuaacacuccgacaagccggcgacgacuucucccgccgcuaccgacgagacuucgccgaaauguccucccaacuccaccucacccccuucaccgcccgcggccgcuucgcaaccgucgucgaagaacucuuccgcgacggcguaaacuggggccgaaucgucgccuucuucgaauucggaggcgucaugugcgucgaaucagucaaccgcgaaaugucaccccucguagacaacaucgcccuauggaugaccgaauaccucaaccgccaccuccacaccuggauccaagacaacggcggcugggacgccuucgucgaacucuacggccccuccaugcgcccccucuucgacuucucauggcucuccuuaaaaacccuccucucccucgcccucgucggcgccugcaucacacucggcgcauaccucucccacaaauaa

SEQ ID NO: 4055 - RNA, 1290 nt, Artificial Sequence
  ABX82700 variant
auggucgaccccguaggcuucgccgaggcauggaaagcccaauuccccgacagcgaacccccgcgcauggaauuacgcucagucggagacauagaacaagaacucgaaagaugcaaagccucaauaagaagacuggaacaagaaguaaaccaggaaagguuccgaaugauauaccuucaaacacuccuggccaaagaaaaaaaaucuuacgacagacaaagauggggauuccgacgagccgcgcaagcgccagacggcgcguccgaaccccgagccagcgccagccgcccacagccggccccggcagacggcgcagacccacccccggcugaggaaccagaagcacggccagacggggaaggaagcccagguaaagccagacccggaacagcgagacgacccggagcagcugccucaggcgagagagacgacagaggcccacccgcaucaguagcagcacuaagaagcaacuucgaacgaauaagaaaaggccacggccagccaggggccgacgccgaaaaaccauucuacguaaacgucgaauuccaccacgaacgaggacuaguaaaaguaaacgacaaagagguaucagacaggauaucauccuuaggcucgcaagcaaugcaaauggaacgaaaaaaaucacaacacggcgcaggcucgagcguaggugacgccucacgaccacccuacagaggacgaucgagcgaaagcucaugcggaguagacggcgacuacgaagacgcggaacuaaacccacgcuuccucaaggacaaccucauagacgcaaacggaggcucaagaccccccuggcccccacuagaauaccaacccuaucaaucaaucuacgucgggggaaugauggagggggaaggcaaaggaccacuccuacgaagccaaucaacaucggaacaagaaaaacgccuaaccuggccaagaagaucauacucacccaggagcuucgaagacugcgggggaggauacacucccgacuguucgagcaacgaaaaucuaacaaguucggaagaggacuucagcucgggacagagcucccgcgucagcccaagcccgacaacauaccgaauguuccgcgacaaaucccgcucacccagccaaaacagccagcaaucauuugacagcucaaguccccccacaccccagugccacaaaagacacagacacugccccguagucguauccgaggcaacaaucguaggaguaagaaaaaccggacaaauauggccaaacgacggcgaaggagcauuccacggagacgccgacggcggcuaa

SEQ ID NO: 4056 - RNA, 1665 nt, Artificial Sequence
  ABX82703 variant
auggucgaccccguaggcuuugcugaagccuggaaagcccaauuccccgacucagaacccccacgaauggaacucagaucagucggcgacaucgaacaggaacuagaacgaugcaaagccuccauacggagacuagaacaagaagugaaccaagaaagauucagaaugaucuaccuacaaacacuccucgccaaagaaaagaaaucauaugaccgacaacgauggggcuuccgcagagcagcccaagcccccgacggcgcgagcgaacccagggcaagcgcaucccgcccacaaccagccccagccgacggcgcagauccacccccagcagaagaaccagaagcacgaccggacggagaaggcagccccggcaaagcccgucccggaaccgcaagaagaccaggagcagcagccucaggagaacgcgacgacagaggcccacccgcaucaguagcagcacuaagaagcaacuuugagcgaauccgcaaagggcacggacaacccggcgccgacgcagaaaaacccuucuacgucaacguggaguuccaccacgaacggggacucgucaaagucaaugacaaagaaguaucagaccgaaucagcagccuaggcucgcaagcaaugcaaauggaacgaaagaaaucccaacacggcgccggcucaagcguaggcgacgcaucccgcccacccuacagaggcagaucauccgaaagcucaugcggggucgacggcgacuacgaagacgccgaacucaacccgcgcuuccuaaaagacaaccucauagacgcaaacggaggcucccgacccccauggccaccccuagaauaccaaccauaccaaucaaucuacgucggcggaaugauggaaggagaaggcaaagguccccuccuacgcucacaaagcacgucggaacaagaaaaacgccucacauggcccagacgcuccuacucaccccgguccuucgaagacugcggcggcggauacaccccagacugcuccagcaacgaaaaccucaccagcagcgaagaagacuucagcucgggccaaucaagccgaguuagcccuucuccaacaaccuaccgaauguuccgcgacaaaucacgcucacccucccagaacagccagcaaucauucgacagcagcagcccgccuacgccccaaugccacaaaagacaccgacacugccccgucgucguaagcgaagcaacaauuguaggaguacgaaaaacaggccagauauggccgaacgacggcgagggagcauuccacggcgacgccgacggcucauucggaacaccgcccggcuacggaugcgcagccgaccgagcagaagaacaaaggcgccaccaagacggccugcccuacauagacgauucacccucgagcucuccccaucucuccuccaaaggcagaggaucacgagacgcccucgucucaggcgcccuagaaagcacaaaagcgagcgaacucgaccucgaaaaaggccucgaaaugagaaaauggguccuaagcgggauccuagccuccgaagaaaccuaccuaucacaccuagaagcacuucuacuuccaaugaaaccacuaaaagcagccgcaaccaccagccaaccaguacucacgagccaacaaauagaaacaaucuucuucaagguccccgaccuacucuag

SEQ ID NO: 4057 - RNA, 1545 nt, Artificial Sequence
  ABX82704 variant
augguagaccccgugggauucgcagaagcauggaaagcgcaauucccagacagcgaaccacccagaauggaacuacgcucagucggagacauagaacaagaacuagaaaggugcaaagccucaauacggcgcuuagaacaagaggucaaucaagaaagauucaggaugauauaccuacaaacgcuacuagccaaagaaaagaaaucauacgaccgccaacgauggggcuuccgccgagccgcgcaagcgccagacggcgcgagcgagcccagagcaucagcaucgcgaccacaaccagcaccggccgacggcgcggacccgccaccggccgaagaaccagaagcacgcccagacggagaagggagccccggaaaagccaggccagggaccgcaagacgacccggagcagcggcaucaggagaacgcgacgacagaggcccgccagcgagcgucgccgcacuaagaagcaacuucgaacgaaucagaaaaggccacggccaaccaggagccgacgccgaaaaaccauucuacgucaacguagaguuccaccacgaacgcggccuuguaaaaguaaacgacaaagaagucagcgaccgcauauccagccuaggaagccaagccaugcagauggagcgaaagaaaucacaacacggcgcgggaucgagugugggcgacgccagcagaccacccuaucgaggaagaucaagcgaaaguucgugcgggguagacggagacuacgaagacgcugaauuaaacccaagauuccuaaaagacaaccuaauagacgcgaacggcgggagucgaccgcccuggccaccccucgaguaccaacccuaccagucgauauacguaggagggaugauggaaggggagggaaaaggcccacuccuacgcagucaaucgaccucagaacaagagaaaagacugacauggccaaggcgaucauacucaccaagauccuucgaagacugcggaggcggguacacgccagacugcagcagcaacgaaaacuuaacaagcagcgaagaagacuucagcucgggccaaagcagccgagugucgcccucaccgacaacauacagaauguuccgagacaaaucgcgcucaccaucacaaaacagccaacaaucauucgacagcucaucaccaccaacaccccaaugccacaaaagacacagacacugcccaguggucgugagcgaagccacaauaguuggagugagaaaaaccgggcaaauauggccgaacgacggcgagggcgcguuccacggcgacgccgacggauccuucggaacgccacccggauacggaugcgcagcagaccgcgcagaagaacaaagacgacaccaagaugggcugcccuacauagacgacagccccaguagcucaccccaccugucaaguaaaggcagaggcucaagagaugcccuaguauccggugcacucgaaagcacgaaagcaagcgaacucgaccuagagaaaggacucgagaugaggaaauggguccuguccggaauccuagcaagcgaagaaaucacgcuauaa

SEQ ID NO: 4058 - RNA, 1326 nt, Artificial Sequence
  ABX82705 variant
auggucgacccaguaggcuucgccgaggcuuggaaagcgcaauucccagacagcgaaccaccccgaauggaacuacgcucaguaggggacauagaacaagaacuagaaagaugcaaggcaucgaucagacgccuagaacaagaaguaaaccaagaaagguucagaaugauauaccugcaaacacuacuggcaaaagaaaagaaaucguacgaccgccaacgcuggggcuucagacgcgccgcacaagcacccgauggcgcaagcgaaccaagagccuccgccucaagaccacaaccagcccccgccgacggagcugacccgccaccggccgaagaacccgaagcgcgcccagacggagaaggaagcccaggcaaagcaaggcccgggaccgccagaagacccggagcagcggccucaggcgaacgagaugaccgcggaccaccggcaagcguggccgcacucaggagcaacuucgaacgcauaagaaaaggccacggucaaccaggagccgacgcagaaaaacccuucuauguaaacguagaguuccaccacgaaagaggacucguaaaagugaacgacaaagaagucucagacaggaucucauccuuaggcucgcaagcgaugcaaauggaacgaaagaaaucacaacacggcgcgggcucgagcgugggagacgccucaagaccacccuaccgaggacgcucgagcgaauccucaugcggagucgacggcgacuacgaagacgcagaacuaaacccacgcuuucucaaagacaaucucauagacgcaaacggaggcucccgcccaccauggccaccacuagaauaccagcccuaucaaucgaucuacguaggaggaaugauggaaggcgaaggcaagggcccccuauuacgaucacaaucgaccucagaacaagagaaaagacuaacauggccccggcgaucauacucgcccagaucguucgaagacugcgggggcggcuacaccccagacugcagcagcaacgaaaaccuaacaaguucagaagaagacuucagcucaggccaaaguucgcgagucuccccaaguccaaccaccuaccgaauguuccgagacaaaucgcgaucaccaucacaaaacagccaacagagcuucgacagcucaagcccacccacgccccaaugccacaaaaggcaccgacacugcccagugguagucagugaagccaccaucgugggagugcgaaaaacaggacaaauauggccgaacgacggcgaaggagcuuuccacggcgacgcagacggaucacuagaacuccaaggcaaacccucgcgcuggacacaauaa

SEQ ID NO: 4059 - RNA, 1575 nt, Artificial Sequence
  ABX82706 variant
augguagaccccgucggauucgccgaggccuggaaagcccaauuccccgacagcgaaccaccaagaauggaacuucgaagugucggagacauagaacaggaacuggaaaggugcaaagccagcaucagacgccuagaacaagaagucaaccaggaaagauucagaaugauauacuuacaaacacuccuagccaaagaaaagaaauccuacgaccgacaaagauggggauucagaagggccgcacaagcacccgacggcgcaagcgaaccaagagccucagccucgcgaccacaaccggccccagccgacggcgcagacccacccccugccgaggaaccagaagcgcgccccgacggagaaggaagcccgggcaaagcuagacccgguaccgcgcgccgccccggagcagcagcaucgggagagcgcgacgaccgaggaccgccagcgagcgucgcagcgcuccgaagcaacuucgaacgaauccgaaaaggccauggccaacccggggccgaugcagagaaaccguucuacgucaacgucgaguuucaccacgaaagaggccuaguaaaaguaaacgacaaagaagucucagacagaaucuccagccugggaucgcaagccaugcaaauggagcggaagaaaucccaacacggcgcgggcucguccguaggagacgcuucacgaccacccuaucgcggaagauccagcgaaagcucaugcggggucgacggcgacuacgaggacgcagagcugaacccacguuuccucaaagauaaccuaauagacgcgaacggaggcucacgaccacccuggcccccacucgaguaccaacccuaccaaucgaucuacguaggaggaaugauggagggagaggguaaaggaccacuauuacgcucacaaucaaccuccgaacaagagaaaagacuaacauggcccaggcgcucauacucaccccgcagcuucgaagacugcggaggcggauacacacccgacugcucaagcaaugaaaacuuaacaagcucagaagaagacuucagcuccggccaauccagccgaguaagcccaagcccgacuacauaccgaauguuccgagacaaaucacgaucacccucacaaaacagccaacaaucauucgacagcucgagcccgcccacgccccaaugucacaaaagacacagacacugcccaguagucguaagcgaagccacaaucgucggcguaagaaagacaggacaaauauggcccaacgacggagaaggcgcguuccauggcgacgcagacgggucauucgggacaccacccggauacgggugcgcugccgacagagcagaagaacaaagacgacaccaagacggccuacccuauaucgacgacucaccaucaagcucaccccaccucucaucaaagggcagaggaucacgagacgcccugguaucaggugcacuugaaagcacaaaagcaagugaacucgaccucgaaaaaggccucgaaaugagaaaaugggacccagucaaaaugacacccacguucucauuacacugcaugauauuauggcccguagagaucacacucuaa

SEQ ID NO: 4060 - RNA, 1398 nt, Artificial Sequence
  ABX82707 variant
augguagaccccgugggauuugccgaggccuggaaggcccaauuccccgacagcgaacccccacgcauggaacuacgcucaguaggggacauagaacaagaacuagaacgcugcaaagccucgaucaggcgccucgaacaagaagugaaccaagaaagauucaggaugauauaccugcaaacacuccuagcaaaagaaaagaaaucauacgacagacaacgcuggggcuucagacgagcagcacaagcgcccgacggagcgagcgaacccagagcaucggcaucgagaccgcaaccugcccccgcagacggcgccgacccacccccagccgaagaaccagaagcacgcccggacggggaaggaagcccgggcaaagccagacccggaaccgcacgacgacccggcgccgcggccucgggcgaaagagacgacagaggcccuccagcgagcguagccgcacuccgcagcaauuucgaacgcauacgaaagggacacggacagcccggagccgaugccgaaaaaccauucuacguaaacguagaguuccaccacgaacgcggacucgucaaaguuaacgacaaagaagucucggacaggaucucuagcuuaggaucacaagcaaugcaaauggaacgaaagaaaucacaacacggcgcaggcucaucugucggcgacgcaucccgaccgcccuacagaggacgcuccagcgaaagcucgugcggagucgauggcgacuacgaagacgcagaacugaacccacgcuuccucaaagacaaccuaaucgacgcgaacggcggcucacgcccucccuggcccccacuagaauaccaaccauaccaaucaaucuacgucggcgguaugauggaaggcgaaggcaaaggcccgcuacuccgcucacaaucgaccucagaacaggaaaaacgccugacauggcccagacgcucauacucgcccagaucauucgaagacugcgggggaggguacacaccagauugcagcagcaacgaaaaccucacgagcucagaagaagacuucagcucuggccaaagcucacgcguuagcccgagcccaacaacauaccgaauguuucgugacaaaucacgcucacccucacaaaacagccagcaaucguucgacagcucaagcccacccacaccccaaugccacaaaagacacagacacugcccaguggucguaagcgaagccacaaucguaggcguucgcaagacagggcaaaucuggccgaacgacggagaaggcgcauuccacggagaacaccccggcgcagccgaggaaguauuccaaaaacuucucccggacauacgcggagcagccgacgcagaccaacucguaugcgaaacgccagacuguccccaacacucugcagaccaccaguaa

SEQ ID NO: 4061 - RNA, 1377 nt, Artificial Sequence
  ABX82709 variant
auggucgaucccguaggcuucgcagaagccuggaaagcacaauuccccgacagugaacccccgcgcauggaacuacguucggucggggacaucgaacaagaacuggaaagaugcaaagccucgaucaggagacuagaacaagaaguaaaccaggaaagguucagaaugauauaccuacagacucuacuggccaaagaaaagaaaucguacgacagacaacgcuggggcuuccgcagagcagcccaagcaccggauggagcguccgaaccuagggcaagugccucgcgcccgcaaccggccccagccgacggcgcggacccgcccccagcagaggaaccggaagcacgaccagacggagaagggagcccaggcaaagcccgacccggaaccgcacguagacccggggcagcagcaagcggcgaacgagacgaccgaggcccgccagcaagcguggccgcgcucagaagcaacuuugagcgaauacgcaagggacacggacaaccuggggccgacgccgagaaaccauucuacgucaacgucgaguuccaccacgaacgaggccuaguaaaagugaacgauaaagaagucagcgacaggauaucgagccugggaucacaagcgaugcaaauggaaagaaagaaaucacaacacggagcgggcaguagcguaggcgaugccucacgcccacccuaccgcgggcgaucaagcgaaaguucaugcggggucgacggagacuacgaagacgcagaacuaaacccgcgcuuccucaaagacaaucucauagaugcaaacggaggcucacgaccacccuggcccccacucgaauaccaacccuaccaaucuaucuacguagggggcaugauggaaggcgaaggcaagggcccgcuccucagaagccaauccaccucggagcaagaaaaacgccuaaccuggccaaggcgaucauacucuccccgcagcuuugaagacugcggaggcggauacacacccgacugcucguccaacgaaaaccuaacguccucggaagaagacuucagcucaggacaaagcucaagagugagcccaagcccaaccaccuacaggauguucagagacaaaucacgcucacccucccaaaacagccagcaaucauucgacagcucgaguccucccacaccccaaugccacaaaaggcacagacacugccccguaguaguguccgaagccacaauaguaggaguacgcaagaccgggcaaauauggccaaacgacggcgaaggcgccuuccacggcgacgccgacggaucauucgggaccccacccggauacugcugccugugccuacccgcauggccguccgggugcacggcagcaaccgcgcgcgugaccagaagcuaa

SEQ ID NO: 4062 - RNA, 1365 nt, Artificial Sequence
  ABX82710 variant
augguagaccccguaggauucgccgaggcuuggaaagcucaauuccccgacagcgaacccccaagaauggaauuacgaucaguaggagacauagaacaagaacuggaaagaugcaaagccagcauaaggcgacucgaacaagaaguaaaccaagaaagauucagaaugauauaccugcagacccuccuagccaaagaaaagaaauccuacgaucgccagcgcuggggcuuccgcagagccgcgcaagcacccgacggagcaagcgaaccccgagccagcgccuccagaccccaaccagccccagccgacggcgcagacccgcccccagccgaagaaccggaagccagacccgacggagaaggaagcccgggaaaagcccgaccaggaaccgccagaagaccaggagccgcggccucaggcgaacgcgacgaccgaggcccaccagccaguguagcggcacucagaucaaacuucgaaagaauaagaaaaggacacggucaaccaggagcagacgccgaaaaacccuucuacgucaacgucgaguuccaccacgaacgcggacucguaaaaguaaacgacaaagaaguauccgaccgaaucucaagccuaggaucacaagcgaugcaaauggaaagaaagaaaucgcaacacggagcaggauccagcguuggcgacgccagccgacccccauacagaggccgcucaagcgagagcagcugcggagucgacggugacuacgaagacgcagaacugaacccacgauuccucaaagacaaccucauagacgcgaacgggggcucgcgcccacccuggcccccacuagaauaccaaccauaccagucgaucuacgucggcggcaugauggaaggagaaggaaaagggccacuccuccgcucccaaagcacaucggaacaagaaaaacgccuaaccuggccaaggagaucauacucgcccagauccuucgaagacugcggaggcggcuacacgccagacugcucaagcaacgaaaaccuaaccuccucagaagaagauuucagcuccggacagagcucgcgcguauccccauccccgaccacauacagaauguuccgagacaaaucaagaucaccuucccaaaacagucaacagagcuucgacagcagcagcccacccacuccccaaugccacaaacggcaccgacacugccccgucgucguuagcgaggccaccauagucggcguaagaaaaacaggacaaauauggccaaacgacggcgaaggagcauuccacggagacgccgacggcucauucggaaccccacccggauacgggugcgcagcaggccgaccaccccaccuaacagaacucccaguccaacaccaauag

SEQ ID NO: 4063 - RNA, 1404 nt, Artificial Sequence
  ABX82711 variant
augguggaccccguaggcuucgccgaagcguggaaagcccaauucccagacagcgaacccccaagaauggaacuaagaagcgucggcgacauagaacaagaacuagaacgcuguaaagccucaauacgacgacuagaacaagaaguaaaccaagaacgauuccgaaugauauaccuacaaacacucuuagccaaagaaaagaaaagcuacgaccgccagcgauggggcuuccgaagggccgcacaagcccccgacggagccagcgaaccccgagccucagccagccgcccccaacccgcccccgcagacggagccgacccaccaccagccgaagaacccgaagcaagaccagacggcgaaggaagccccggaaaagcccgacccggaacagcacgcagaccaggagccgcggcaagcggagaaagagacgaccgcggcccacccgcaagcguagcagcccugcgauccaacuucgaacgaauccgaaaaggccacggccaacccggagcagacgccgaaaaacccuucuacgucaacgucgaguuccaccacgaacgaggccuaguaaaagucaacgacaaagaagucagcgacagaauaagcagccugggaucacaagcaaugcaaauggaacgcaagaaaucccaacacggcgccggcucauccguaggagacgcauccagaccacccuauagaggacgcagcucagaaagcucaugcggaguagacggcgauuacgaagacgcagaacuaaacccccgcuucuuaaaagacaaccuaaucgacgcaaacggaggcucacgacccccauggccgccacuagaauaccaaccuuaccaauccaucuacguaggcggcaugauggaaggagaaggcaaagggccccuacuuagaucgcaguccacaagugaacaagagaaaagacucaccuggccaagacggagcuauucacccagauccuucgaagacugcgggggcggauacacaccagacugcuccagcaacgaaaaccucacaagcagcgaagaagacuucagcucagggcaaucaucacgaguauccccaagcccuacaaccuaccgaauguucagggacaaaucaaggagccccagccaaaacucccaacaaucguucgacucaucaagcccaccaacaccacaaugccacaaacgacaccgacacugcccaguaguaguaagcgaagcaacaauagugggaguacgcaaaaccggccaaauauggccaaacgacggcgaaggcgcauuccacggcgacgccguccucaaaaccgaagucccacaccagggcguaagacgagccagacucucacucgaagcacugggagaagaccccagcuuccuauuccccgccagcgacggcccaagacacagcuccaccugguaa

SEQ ID NO: 4064 - RNA, 1542 nt, Artificial Sequence
  ABX82712 variant
augguagacccaguaggcuucgcagaagccuggaaagcacaauucccagacagcgagccaccccgcauggaacucagaucagucggagacaucgaacaagaacuugaaagauguaaggcaucaauaagacgccucgaacaagaaguaaaccaagaaagauucagaaugaucuaccuccaaacacuccuagccaaagaaaagaaaucguacgaccgccaacgauggggcuuccgacgcgcagcacaagcacccgacggagcauccgagccccgcgccucagccucacgaccacaacccgccccggcagacggagcagacccaccacccgccgaagaacccgaagccagacccgacggagaaggaagccccggaaaagccagaccaggaacagcacgucgacccggagcagcagcaucaggagaaagagacgaucgcggcccacccgcauccgucgccgcccuccguuccaacuucgaacggaucagaaaaggccacggccagcccggcgcagacgcagaaaaacccuucuacgucaacguagaguuccaccacgaacgcggacucgugaaagucaacgacaaagaagucuccgaccgaauauccagccuaggcucacaagccaugcaaauggaacgaaagaaaucacaacacggcgcaggcuccuccgucggcgacgccucccggccacccuaccgcggccguucaucagaauccucaugcggagucgacggcgacuacgaagacgcagaacuaaacccgagauuccucaaagacaaccuaaucgacgccaacggaggcucccgaccacccuggcccccacucgaauaccaacccuaccaaucgaucuacgucggaggcaugauggagggcgaaggcaaaggaccccuucugcgcucccagagcacuucagaacaagaaaaacgccuaaccuggcccagacgaucauacagcccucguuccuucgaagacugcgggggaggcuacacccccgacugcucaagcaacgaaaaccucaccagcuccgaagaagacuucagcucaggccaaagcucacgaguaagcccgagcccgacaaccuacagaauguuccgcgacaaaucacgcuccccaucccaaaacucucaacagagcuucgauagcuccagcccaccaacaccccaaugccauaaacgccacagacacugcccagucgucgucagcgaagcaaccauaguaggcguacgaaaaaccggccaaauauggccaaacgacggcgagggagcauuccacggcgacgccgacggcuccuucgggacaccacccggauacggcugcgcggccgaccgagccgaagaacaacgacgccaccaagacggacuccccuacauagacgacucccccucgagcucaccccaccuaucauccaaaggaagaggcucccgcgacgcccugguuucaggcgcacucgaaagcacaaaagccucagaacucgaccccgucaaaaugacacccacauucucccuacacugcaugauacucuggcccguagaaaucaccuuauaa

SEQ ID NO: 4065 - RNA, 1221 nt, Artificial Sequence
  ABX82714 variant
augguagacccagucggauucgccgaagccuggaaggcacaauucccagacagcgaaccaccgaggauggaacuaaggucaguaggagacaucgaacaagagcuagaaagaugcaaagccagcauacgacgccucgagcaagagguaaaccaagagcgauuccgaaugaucuacuuacaaacccugcuagcaaaagaaaagaaaucauacgacagacaaagauggggcuucaggagagcagcgcaagcaccagacggcgccucagaaccaagagccuccgcaagcagaccccaaccagccccagcagacggagcagacccaccacccgcagaagaacccgaagcaagacccgacggagagggaagccccggcaaagcccgaccaggaacggccagacgacccggagcagcagccagcggcgaacgagacgaccgaggcccaccagcaagcguggccgcacuacgcaguaacuucgaacgaauccgaaaaggacacgggcaaccaggagccgacgcagaaaaacccuucuacguaaacguagaguuccaccacgaaagaggacucguaaaaguaaaugacaaagaaguaagcgacagaauauccucacucggaucacaagcaaugcaaauggaaagaaagaaaagccaacacggggccggcucaagcguaggagacgccagccgaccgcccuacagaggacgaagcagcgaauccuccugcggcgucgacggagacuacgaagacgcagaacuaaacccacgcuuccucaaagacaaccuaauagaugccaacggaggcagcagacccccauggccaccccuagaauaccaaccauaccaaagcauauacguaggaggaaugauggaaggagaaggaaaaggaccgcuacucagaagccaaagcaccagcgaacaagaaaaacggcugaccuggcccagacgcucauacagcccacgauccuucgaagauugcggcggcggauacacaccagacugcagcagcaacgagaaccuaacaagcagcgaagaagacuucagcagcggacaaagcagcagaguaucaccaagcccgacaacauaccggauguucagagacaaaagcagaagcccaagccaaaauagccaacagagcuucgacagcagcucacccccaacaccccaaugccacaaacgacaccgccacugcccaguagucguaagcgaagcaaccagcggacaauaa

SEQ ID NO: 4066 - RNA, 2346 nt, Artificial Sequence
  AAH58926 variant
auggccacccaagccgaccugauggaacucgacauggccauggaacccgaccgaaaagcagccgucucacacuggcaacaacaaucguaccucgacucaggcauucacagcggagccacaaccaccgcacccagccucagcggaaaagguaaccccgaagaagaagacgucgacacaucacaaguucucuacgaaugggaacaagguuucucccaauccuucacccaggaacagguagccgacauagacggccaauacgcaaugacacgggcccaacgaguccgcgcugccauguuccccgaaacacucgacgaaggcaugcaaaucccaucaacccaauucgacgcugcccacccaacaaacguccaacgccuggcagaaccaucacaaaugcucaaacacgcagucguaaaccuuauaaacuaccaagacgacgcugaacuugcgacccgagccauccccgaacucaccaaacuacuaaaugacgaagaccaagucguaguaaacaaagccgcagugaugguccaccaacucuccaaaaaggaagccucccgacacgcaaucaugcgcagcccacaaauggucuccgcuauaguccgaacuaugcagaacaccaaugacguagagaccgcgcgaugcaccgcgggaacgcuccauaaccuaucacaccauagggaaggacuccucgcuauauucaaauccggcggaauacccgcacucgucaagaugcuaggaucccccgucgacucuguccuguucuacgccaucaccacccuccacaaccuccuacuccaucaagaaggagcaaaaauggccgucagacucgccggcggacuacagaaaauggucgcccugcucaacaaaacgaacgucaaauuccucgcuauaaccaccgacugcuuacaaauccucgccuacgguaaccaagaaucaaaacuaaucauccucgccagcgggggcccccaagcccuaguaaauaucaugcgcacauacacuuacgaaaaacuacuauggacaaccucgaggguccuuaagguccucuccgucugcucaucaaacaaaccggccaucgucgaagcaggaggaaugcaagcccucggccuccaccucaccgacccaucucaacgccuaguccaaaacugccuuuggacacuacgaaaccucucagacgccgccacaaaacaagaaggaauggaaggccuccuuggcacucuaguacaacuccucggcuccgacgacauaaacgucgucaccugugcagcagguauccuaucaaaccuaaccugcaacaacuacaaaaacaaaaugauggucugccaagucgggggaaucgaagcacucguccgcacaguacuccgggcgggggaccgcgaggauaucaccgaaccggccaucugugcccuccggcaccuaaccuccagacaccaagaagcagagauggcacaaaacgcggugcgacuccacuacggacuccccgucgucgucaaacuccuacacccacccucccacuggccccucaucaaagccacagucggcuuaauccggaaccuagcacucugccccgcuaaccacgcgccccuccgggaacagggcgcaaucccccgauuaguacaacuccucguccgcgcacaccaggacacacagcgaaggaccagcaugggcggcacccagcaacaguucguagaagguguacgcauggaggaaaucguggaaggaugcacgggagcccuacacauacucgcacgugacguccacaaccgaauagucauccgaggccuaaacaccauaccccuuuucguacaauuacucuacucucccauagagaacauacaacgcguggccgcaggaguacuaugcgagcucgcccaggacaaagaagcggcugaagccauagaagccgaaggcgccaccgcuccccuuaccgagcuccuucacucacgcaacgagggaguagcuaccuacgcagcagccguacuauuucgcaugucagaggacaagccccaagauuauaagaaaagacucucagucgaacuaaccucaucccucuucagaacggaaccgauggccuggaacgaaacagccgaccuagggcucgacauaggcgcacaaggcgaaccccuaggcuacagacaggacgacccgucguaccgcagcuuccacucaggaggguacggccaagacgcacuaggcauggacccaaugauggaacacgaaaugggcggucaccacccaggcgcugauuaccccgucgacggccuacccgaccuaggucacgcccaagaccucauggacggacuuccacccggcgacucaaaucaauuggcaugguuugauacagaccucuaa

SEQ ID NO: 4067 - RNA, 1692 nt, Artificial Sequence
  AAI21007 variant
auggacguaggagaacuccugagcuaccaacccaacagagggaccaaaagaccaagagacgacgaggaagaggaacagaaaaugcgccgaaaacaaacaggcaccagagagaggggucgcuaccgcgaggaagaaaugacaguagucgaagaagcagacgacgacaagaaacgacuccuccaaauaaucgaccgcgauggagaggaagaggaagaagaagaggaaccccuagacgaaagcagcguaaagaaaaugauacucaccuuugagaaacgaagcuacaaaaaccaagaacucagaaucaaauuccccgacaaccccgaaaaauucauggagagcgaacuagaccucaacgacauaauccaagaaaugcacguaguagcaaccaugcccgaccucuaccaccuccuaguagagcuaaacgcaguccaaagccuacucggacuccuaggccacgacaacacggacguaagcaucgcaguagucgaccuacuccaagaacuaaccgacaucgacacacuccacgagagcgaggaaggagccgagguccugaucgacgcccuaguagacggccaaguuguagcgcuacucguucagaaccuagaacgccuagacgagagcguuaaagaggaagcagacggcguccacaacacccucgccaucgucgaaaacauggccgaguucagaccggaaaugugcaccgaaggagcgcaacaaggacuacuacaauggcuccuaaaacgacucaaggcaaagaugccguucgacgccaacaaacucuacugcagcgaaguacucgccauacuccuacaagacaacgacgagaaccgagagcuccuaggcgaacucgacggcauagacguccuacuacaacaacuaucaguauucaaacgccacaacccgucaacagcagaggaacaagaaaugauggaaaaccuauucgacagucucugcaguugccucaugcuuagcagcaaccgagaacgcuuccuaaaaggagagggccuacaacuaaugaaccucaugcuccgugagaaaaagaucuccagaagcagcgcacuaaaaguacucgaccacgcaaugaucggcccagaaggcaccgacaacugccacaaguucgucgacauacuagggcucagaacaaucuucccacucuucaugaaaagcccgagaaaaaucaagaaaguaggcaccaccgaaaaagaacacgaagaacacgucugcagcauacucgccagccuccucagaaaccuacgagggcaacaacgcacgcgacuacucaacaaauuuacggaaaacgacagcgaaaaaguagaccggcugauggaacuacacuucaaauaccucggagccaugcaaguagcagacaagaaaaucgaaggcgaaaaacacgacauggucaggcgcggagaaauaauagacaacgacaccgaggaagaguucuaccugaggcgccuagacgcgggccuauuuguacuccaacacauaugcuacauaauggccgaaaucugcaacgcaaacgucccgcaaauccgacaacgaguacaccaaauacucaacaugcggggauccaguauaaaaauagucagacacauaaucaaagaguaugcagaaaacauaggagacgggagaagccccgaguuccgcgaaaacgaacagaaaagaauccucggccuacuagaaaacuucuaa

SEQ ID NO: 4068 - RNA, 1833 nt, Artificial Sequence
  CCDS4772.1 variant
auggaaacagccccaaaacccggaaaagacgucccccccaaaaaagacaaacuccaaaccaaacgcaaaaaaccaaggcgcuacugggaagaagaaacaguccccacaaccgccggagccagcccaggccccccacgaaacaaaaaaaaccgagaacuacgcccacaacguccgaaaaacgccuacauccucaaaaaauccagaaucuccaaaaaaccccaagucccaaaaaaaccaagagaauggaaaaaccccgaaagccaacgcggccuaucaggcacacaagacccuuucccaggacccgcacccgugccaguagaaguaguccaaaaauucugcagaaucgauaaaagccgaaaacuuccacacuccaaagcaaaaacuagaucccgacucgaagucgccgaagccgaagaagaagaaacaagcaucaaagccgcacgaagcgaacuccuacuagcagaagaaccaggcuuccuagaaggcgaagacggcgaagacacggccaaaauaugccaagcagacauagucgaagccguggacauagccuccgcggcgaaacauuuugaccucaaccuuagacaauucggacccuaccggcucaacuauagccgaacgggcaggcaccucgccuucggcggccgcagaggacacgucgccgcccucgacuggguaaccaagaagcuaaugugcgaaaucaacguuauggaagcggucagggacauccgcuuucugcacagcgaggcacuacuagccgucgcacaaaaccguuggcuccacauauacgacaaccaagguaucgaacuacauugcaucagacgaugcgaccgagucacccgacuagaauuccuacccuuccacuuccucuuagccacagccucagaaacgggcuuccuaacauaccucgacguaagcguaggaaaaaucguggccgcacucaacgcccgagccggccggcucgaugucaugucccaaaaucccuacaacgcagucauacaccugggccacagcaacggaacggucagccuauggagcccagccaugaaggaaccccucgcaaaaauccucugccaccgcggaggcguuagagccgucgcgguagacuccacaggcaccuacauggccacaucagggcuagaccaccaacucaaaauauucgaccuccgaggcaccuaccagccccucuccacccggacacuaccccacggcgccggccaccucgcguucucacaacgaggacuacucguagccggcaugggagacguggucaacaucugggccggccaagguaaagcaagccccccaagccuggagcagccuuaccucacacacagacuuucgggacccguacacggucuacaauucugccccuucgaagacguacucggagucggacacaccgggggcauaaccucaaugcucguacccggcgcaggagaaccaaacuucgacggccucgaaucaaacccauacagaucacgaaaacagcgacaggaaugggaggucaaagcacuccucgaaaaaguucccgcagaacucaucugccuagacccgcgcgcccuagcggaagucgacgucauaucccuagagcaaggaaagaaagagcaaaucgaacgacuaggcuacgacccccaagcgaaagccccguuccaacccaaaccgaaacaaaaaggacgcucuagcacugcaucacuugucaaacgcaaacgcaaagucauggacgaggaacaccgcgacaagguacgacagagucuacaacaacagcaccacaaggaggcaaaagcaaaacccaccggagcacgcccaagcgcccuagacagauucguacgguaa

SEQ ID NO: 4069 - RNA, 897 nt, Artificial Sequence
  AAG37878 variant
augggcccgaaagauagcgcgaaaugccuccaucgcgggccccagccaucgcacugggccgcaggcgauggcccaacccaggaaaggugcgggcccaggagccugggcucaccagugcucgggcucgauaccugucgcgcgugggaccacguagacgggcaaauacucgggcaacugcgcccccuaacagaagaggaagaggaagagggagcgggcgcgacccugagcaggggcccggccuuuccagggauggggagcgaggaauuacgcuuggccucguucuaugacuggcccuuaacagcggaagugccaccggaauugcucgcagccgcgggcuuuuuccauacagggcaccaggacaaagucaggugcuucuucuguuacgggggcuuacaaucguggaagcgcggggacgauccauggacagagcacgcgaaaugguucccgagcugucaauuccucuugcgaucaaaaggacgagacuucguucacucaguccaggaaacgcacucgcaacuacucgggagcugggacccaugggaagaaccggaagaugccgcgcccguggcaccgagcgugcccgcuagcggguacccggaauugcccacgcccaggcgcgagguccagagcgagagcgcgcaagagcccgggggcguaagcccggccgaagcccagagagcguggugggucuuggaaccgccaggagccagggacguggaagcgcaauugcgcaggcuccaggaggaacgcacgugcaaggucugucucgaccgcgcggucucgauaguauucgugccauguggccaucucguaugcgcggaaugcgccccaggccuacaacugugcccaaucugccgagcaccugugcggucacgcgugcgcacguucuugagcuaa

SEQ ID NO: 4070 - RNA, 2280 nt, Artificial Sequence
  EAW60925 variant
auggaccuaagcgcccuccgcguagaagaaguccaaaacguaauaaacgccaugcagaaaauccucgaaugcccaauaugccucgaacuaauuaaagaaccagucucaacgaaaugcgaccacaucuucugcaaauucugcaugcucaagcuccucaaccaaaagaaagguccaucacaaugcccgcuaugcaaaaacgauaucacgaaacgcagccuccaagaaucgaccagauucucacaacucguugaagaacucuuaaaaaucaucugcgccuuccaacucgacacaggacuagaauacgccaacucauacaacuucgccaagaaagaaaacaacuccccggaacaucucaaagacgaaguauccaucauccaguccaugggcuaccguaaccgcgcgaaacgccuccuccaaagugaaccagaaaaucccucacuacaagagacaucacuauccguacaacuuucaaaccuagggaccguacgaacccucagaaccaaacaacggauccaaccacagaaaaccagcguauauaucgagcuaggcagcgacuccucagaagacacaguaaacaaagccaccuacugcucaguaggagaccaagaacuacuacaaauaacaccccaaggcacccgcgacgaaauaucgcucgacagcgcaaagaaagcagccugcgaguucagcgaaaccgacgugaccaauacagaacaccaccaacccagcaacaacgaccucaacaccacagagaaaagagcagcugaacgacaccccgaaaaauaucagggugaagccgccuccggaugcgaaagcgaaacuuccguaagcgaagauugcuccggacuauccagccaaagcgauauccucacgacccaacaacgcgacaccaugcaacacaaccuaaucaaacuccaacaggaaauggcagaacuagaagcaguccuagaacaacacggaucccagcccuccaacucauaccccuccauaauauccgacuccagcgcccucgaagaccuacgaaaucccgaacaaagcaccagcgaaaaaguccuaaccucccagaaaagcucagaguaccccaucagccaaaacccagaaggccucuccgccgacaaauucgaagucagcgcagacaguagcaccagcaaaaacaaagaacccggcgucgaaagauccagcccauccaaaugccccucccucgacgacagaugguacaugcauagcugcucaggcucacuucaaaaucgcaacuacccaucacaagaggaacuaaucaaaguugucgacgucgaagaacagcaacuagaagaguccggcccacacgaccuaacagaaacaagcuaccuaccccgacaagaccuggaaggcacccccuaccuugaguccggcaucucccuguucuccgacgacccagaaucagacccgagcgaagaccgcgcacccgaauccgcccgcguaggcaacaucccaucuaguacauccgcacucaaaguuccucaacucaaagucgccgaguccgcucagucgcccgcugcagcccacaccacagacaccgccggauacaacgccauggaagagucaguaagccgugaaaaaccugaacucacagccucaaccgaacgugucaacaaacgcaugucaauggucguguccggcuuaacacccgaggaauuuaugcuagucuacaaauucgcccgaaaacaccacaucacccucaccaaccuaauaaccgaggagacaacccacgucguaaugaagaccgacgcagaauuuguaugcgaacgcacacuaaaauauuucuugggcaucgccggcgguaaaugggucgucagcuacuucugggucacacagucuaucaaagagcgcaaaaugcuaaacgaacacgacuucgaaguacgcggagacgucguaaacggucgaaaccaccaagguccaaagcgcgcccgcgagucccaagacagaaaaaucuucagaggcuuagagaucugcugcuacggacccuucacaaacaugccaaccgaccaacucgaauggaugguacaacuaugcggagcauccgucgugaaggaacucuccuccuucacccucggcacaggcguacaccccauaguggucguccagcccgacgcauggacagaggacaacggcuuccaugccaucggacaaaugugugaagcccccgucgucacaagagaaugggucuuagacucagucgcacuauaccaaugccaagaacucgacaccuaccuaaucccacagauuccccacagccacuacuga

SEQ ID NO: 4071 - RNA, 2160 nt, Artificial Sequence
  EAW60922 variant
auggaccuuagcgcccuccgcgucgaagagguucaaaacguaauuaacgcaaugcaaaagauacuagaaugccccaucugcuuagaacucaucaaggagccagucuccaccaaaugcgaccacaucuucugcaaauucuguaugcucaagcuccucaaccaaaagaaaggacccucccaguguccgcuaugcaaaaaugacauaaccaaacggucgcuccaagaauccacccgcuucucccaacugguagaagaacuccucaaaauuaucugugcauuccaacucgacaccggccucgaauacgcgaacagcuacaacuucgcuaagaaagaaaacaacucaccagaacaccucaaagacgaagucuccauaauacaauccaugggauaccgaaaccgcgccaaacgccuccugcaauccgaaccggagaaccccucgcuccaagaaacaucccuauccguacaacuauccaaucucggaaccguacgaacccuccgcaccaaacaacgaauccaaccacagaaaaccagcgucuacaucgaacuagccgccugcgaguucucagaaaccgacguaaccaacaccgagcaccaccaacccucuaacaacgaccucaacacuacagaaaaacgugccgccgaacgacaccccgaaaaauaccaaggcgaggccgccuccggcugcgaaucagaaaccagugucuccgaagacugcagcgggcucuccagccaauccgacauccuaacaacucaacaacgagacaccaugcaacacaaccuaaucaaacuccaacaagagauggcagaacuagaagcagugcuugaacaacauggcucccaacccagcaacucauaccccuccauaaucucagacagcuccgcccucgaagaccuccggaauccagaacaaucgaccuccgaaaaggccguccucacaagccaaaagagcuccgaauaccccaucagccagaacccagagggccucucagccgacaaauucgaagucuccgccgacagcucaacgagcaaaaacaaagaaccaggaguagaacgcucaucaccaucaaaaugccccagccucgacgaccgcugguacaugcacucaugcucgggaucccuccaaaauagaaacuacccaucgcaggaagaacucauaaaagucguugacguagaagaacaacagcuugaagaaucaggcccccacgaccucacagaaaccagcuaccucccgcgacaagaccuggaaggcacccccuaccuagaaucagggaucucucucuucuccgacgaucccgaaucagaucccuccgaagaucgcgccccagagucagcccgcgugggaaacaucccaagcucgaccucggcccugaaagucccacaacuaaaagucgccgagucggcccaaagucccgccgcagcacacacuacagacacagccggauacaacgcuauggaagaaagcgucucacgggaaaaaccggaauuaaccgccagcaccgaacgcguaaacaaaagaaugagcauggucgucucaggccucacgccagaggaauuuaugcucguauacaaauucgcccgaaaacaccacauaacccuaaccaaccuaaucacagaagaaacgacccacguaguaaugaaaaccgacgccgaguucgugugcgaacgcacacuaaaauauuuccuaggaaucgccggcggcaaaugggucguaucauacuucugggucacccaaucgaucaaggaacgcaaaaugcucaacgaacacgacuucgaaguacgaggagauguagucaacggacgaaaccaccagggacccaaacgcgcccgagaaagccaagacagaaaaauauuuagggggcuagaaaucuguugcuacggcccuuucaccaacaugcccaccgaccaacuugaauggaugguucagcucugcggggccuccgucgucaaggaacuauccuccuucaccuuaggaaccggaguccaccccauaguugucguacaacccgacgccuggaccgaagacaacggcuuccacgccaucggccaaaugugcgaggcccccguaguaacgcgcgaauggguccuggauuccguagcacuauaccaaugccaagaacucgacacauaccuaauaccccaaaucccucacagccacuacuag

SEQ ID NO: 4072 - RNA, 2166 nt, Artificial Sequence
  EAW60923 variant
auggaccucagcgcccucaggguugaagaaguccagaacguaauuaacgcaaugcaaaagauucucgaaugcccaaucugccucgagcuaaucaaagaacccgucagcaccaaaugcgaccacaucuucuguaaauucugcaugcuaaaacuccuuaaccaaaagaaaggccccucccaaugcccccucugcaaaaacgacaucaccaaacgaucccuccaagaaagcacucguuucagucagcuagucgaggaacuccuaaaaaucauaugcgccuuccaacucgacaccggauuggaauacgcgaacuccuacaacuucgccaagaaggaaaacaacuccccagagcaccucaaagacgaaguauccaucauccaaucuaugggcuaccgaaaccgggccaaacgacuccuccaaucagaacccgaaaaccccagccuacaagaaaccucccuaagcguccagcuaucaaaccucggaaccguccgaacccuacgaacaaaacaacggauccaaccacagaaaacauccgucuacauugagcuaggcagcgacuccucagaagacaccguuaacaaagcaacauacugcucagucggcgaccaagaacuacuccaaaucacuccccaaggaacccgcgacgagauaucccucgacucagccaaaaagggcgaagccgccuccgguugcgaaucagaaaccucaguauccgaagacugcucaggcuugagcucccaauccgauauccuaaccacccaacaacgcgacaccaugcaacacaaccucaucaagcuccaacaggaaauggccgaacucgaagcaguccucgaacaacacggcucgcaacccuccaacuccuaccccagcaucaucucagauucaagcgcccucgaagaccuccgaaaccccgagcaaucuacuucagaaaaagcaguacucaccucgcaaaaauccucagaguaccccauaucacaaaauccggaaggacucagcgcagacaaauucgaaguaucugccgacucaagcaccuccaaaaacaaagaaccaggagucgaacgcuccuccccuuccaaauguccaucccucgacgacagaugguacaugcacuccugcucuggcucccuacaaaaucgaaacuaucccagccaagaagaacugaucaaagucguggacguagaagaacagcaacuagaagaauccggcccccaugaccucacugagaccucauaucucccgcgacaagaccuugaaggcacccccuaccucgaauccggcauaucacucuucuccgacgaucccgagucagacccuucugaggaccgagccccggaaagcgcacgggucggcaacauucccuccucaacaucugcccuaaaagucccgcagcuuaaagucgcugaaagcgcacaauccccagccgccgcccacacaaccgacaccgcaggcuacaacgcuauggaagaaagcgucucccgagaaaaacccgaacuuaccgccuccacagagcgcgucaacaaacgcaugucaaugguggucucgggccuaacacccgaagaguucaugcuaguauacaaauucgcucgcaaacaccacauaacacucaccaaucucaucaccgaagagaccacacacgucgucaugaagaccgacgcggaguucgucugcgaacgcacucucaaauacuuccucgggauagccggagggaaaugggucgucucauacuucugggucacccaguccauaaaagaaagaaaaaugcucaacgaacacgauuucgaaguccgaggcgacguggugaacggccgcaaccaccaaggcccgaaacgcgcccgggaaucccaagacagaaagaucuucagaggccuagaaaucuguugcuacggacccuucaccaauaugcccacagaucaacuagaauggaugguccaacucugcggagcauccguugucaaagaacucagcuccuucacccucggaaccggcguacaccccauaguaguagugcagccagacgccuggacagaagacaacggcuuccaugccaucggccagaugugcgaagcaccaguaguaacacgcgaauggguccuugacuccguagcccuauaccaaugccaagaacucgacaccuaucucaucccccaaaucccccacucccacuacuaa

SEQ ID NO: 4073 - RNA, 36 nt, Artificial Sequence
  AIC83575 variant
auggauuugagugcguugaggguggaggagguguga

SEQ ID NO: 4074 - RNA, 522 nt, Artificial Sequence
  ABC59810 variant
auggacgccgaauucgucugcgaacgaacccucaaauacuuccuaggcaucgccggcggcaaaugggucgucuccuacuucugggucacccaauccaucaaagaacgcaaaaugcucaacgaacacgacuucgaaguacgcggcgacgucgucaacggccgcaaccaccaaggccccaaacgcgcccgcgaaucccaagaccgcaaaaucuuccgcggccucgaaaucugcugcuacggacccuucaccaacaugcccaccgaccaacucgaauggaugguacaacucugcggcgccuccgucguaaaagaacucuccuccuucacccucggaaccggcguccaccccaucgucgucguccaacccgacgccuggaccgaagacaacggcuuccacgccaucggccaaaugugcgaagcccccguagucacccgcgaauggguccucgacuccguagcccuauaccaaugccaagaacucgacaccuaccucaucccccaaaucccccacucccacuacuaa

SEQ ID NO: 4075 - RNA, 1065 nt, Artificial Sequence
  ABC88652 variant
augcacucaugcucaggaucccuccaaaaccgaaacuaccccucacaagaagaacuaaucaaagucgucgacgucgaagaacaacaacuggaagaaucaggaccacacgaccucaccgaaaccucauaccuaccacgccaagaccucgaaggcacaccauaccuagaaucaggcaucucccuauucuccgacgacccagaaagcgaccccagcgaagaccgcgccccagaaagcgccagagucggcaacauacccuccuccacauccgcccucaaagucccccaacucaaagucgcagaauccgcacaaggaccagccgccgcccacaccaccgacaccgccggauauaaugccauggaagaaucugucucccgcgaaaaacccgaacucacagccagcacagaacgaguaaacaaacgaauguccaugguaguaucaggccucacccccgaagaguucaugcucgucuacaaauucgcccgaaaacaccacauaacccucaccaaccucaucaccgaagaaacgacccaugucgucaugaaaaccgacgcagaguucguuugcgaacgcacacuaaaauacuuccugggcauagccggaggaaaaugggucgucagcuacuucugggucacccaaucaaucaaagaaagaaaaaugcucaacgaacacgacuucgaaguacgcggcgacgucguaaacggccgcaaccaccaaggccccaaaagagcccgcgaaucccaggaccgaaagauauuccgcggccucgaaaucugcugcuacggacccuucaccaacaugccaaccgaccaacucgaauggaugguccaacuuugcggggccuccgucguaaaagaacucagcuccuucacccuaggcaccggcguccacccaaucguggucguccaacccgacgccuggaccgaagacaacggcuuccacgccauaggacaaaugugcgaaaccccaguagucacccgagaauggguccucgacagcgucgcccuuuaucagugccaagaacuagacaccuaccucaucccccaaaucccccacucacacuacuaa

SEQ ID NO: 4076 - RNA, 2043 nt, Artificial Sequence
  EAW60939 variant
auggaucuaucggcccuccguguagaagaaguccagaacgucauaaacgccaugcagaaaauucucgaaugccccaucugccuagaacucauaaaggaacccgucucaaccaaaugugaccacauuuucugcaaauucugcauguuaaaacuacucaaucaaaagaaaggccccucgcaaugcccccuaugcaaaaaugacaucaccaaacgaucccuccaagaaucaacccgcuuuucccaacucgucgaggaacuccucaaaauaaucugcgcauuccaacucgacacgggcuuggaguacgccaacuccuacaacuuugcaaagaaagagaauaauucccccgaacacuuaaaagacgagguaucuauaauacaaucaaugggcuaccgcaacagagccaaacgccuccuacaaagcgaacccgaaaaccccucccuccaagagaccucccucucgguacaacucagcaaccugggaacgguccgaacgcuacgcacaaagcaaagaauccagccccagaaaaccuccgucuacaucgaacucggcgaagccgcaucaggcugcgaauccgaaaccucagucucugaagauugcuccgguuuauccucccaauccgacauccucaccacacaacaacgcgacaccaugcaacacaaccucaucaaacuccaacaggagauggccgagcucgaggcaguccucgaacagcacgguagccaaccauccaacucuuaccccuccaucaucagcgacucauccgcccucgaggaccuccgcaacccagaacaguccaccucagagaaagccguacucacaucccaaaaaucaucagaauacccuaucucucaaaaccccgaagggcucagcgccgacaaguucgaggucuccgccgacuccucaaccuccaaaaacaaggagcccggcgucgaacgcuccucccccucuaaaugcccaagucuugacgacagaugguacaugcacucuugcagcggcagccuccaaaauagaaacuaccccucgcaggaagaacucaucaaaguagucgacguagaagaacagcagcuagaagagucaggcccccacgaccuaacagaaaccagcuaccucccucgacaagaccuagaaggcacaccuuaccuagaauccggaaucucacucuucuccgacgacccagaaucagacccaucagaagaccgcgcacccgaaagugcccgcgucgggaacauacccagcagcacauccgcacuaaaagucccucaacucaaagucgccgaauccgcccaguccccugcggcugcccacaccaccgauaccgccggauauaacgcaauggaggaaucagucucccgagaaaaacccgaacucacagccucaacugaacgcgucaacaaacgcaugagcauggucgucuccggccucacccccgaagaguucaugcuugucuacaaauucgcccgcaaacaccacauaacccucaccaaccuuauaacagaagaaaccacacacgucgucaugaaaaccgacgccgaguucguaugcgaacgcacacucaaauacuuccugggaauagcgggagggaaauggguaguaucauacuucugggucacccaaagcaucaaagaacgcaaaaugcucaacgaacacgacuucgaaguccgcggagacguagucaacgggcgcaaccaccaaggaccaaaaagagcccgcgaaucgcaagacagaaaaaucuuccgcggacucgaaauaugcugcuacggaccauucacuaacaugcccaccgaccaacucgaauggaugguccaacugugcggugcuucaguaguaaaggaacucucauccuucacccugggcaccggcguccaccccaucgucguaguccaacccgacgcguggacagaagacaacggauuccacgcaauaggccaaaugugcgaagccccagucguuaccagggaauggguccuugacagcgucgcacucuaccagugccaagaacucgacacauaccucauaccccaaauuccacacucccacuacuaa

SEQ ID NO: 4077 - RNA, 546 nt, Artificial Sequence
  AAC72302 variant
augcuccucgaacccggccgcggcugcugcgcccucgccauccuccucgccauagucgacauccaauccggcggcugcaucaacaucacauccuccgccucccaagaaggcacccgccucaaccucaucugcacagucuggcacaaaaaagaagaagccgaaggcuucgucgucuuccucugcaaagaccgcuccggagacugcucccccgaaaccucccucaaacaacuccgccucaaacgcgaccccggcaucgacggcgucggcgaaaucuccucacaacucauguucaccaucucccaaguaaccccccuccacuccggcaccuaccaaugcugcgcccgcucccaaaaauccggcauccgccuccaaggccacuucuucuccauccucuucaccgaaaccggcaacuacaccgucaccggccucaaacaacgccaacaccucgaauucucccacaacgaaggcacccucuccuccggcuuccuccaagaaaaagucuggguaaugcuagucacaucacucgucgcccuacaagcccucuaa

SEQ ID NO: 4078 - RNA, 639 nt, Artificial Sequence
  BAG58223 variant
augcuacucagcguauacuucaaagaacaauuccucgacggcgacggauggaccucacgcuggaucgaaagcaaacacaaauccgacuucggcaaauucguccuaagcucaggcaaauucuacggcgacgaagaaaaagacaaaggacuccaaaccucacaagacgcccgguucuacgcccuaagcgccagcuucgaaccauucuccaacaaaggccaaacccuagucguccaauucaccgucaaacacgaacaaaacaucgacugcggcggcggcuacguaaaacuauuccccaacagccucgaccaaaccgacaugcacggcgacagcgaauacaacaucauguucggccccgacaucugcggcccaggcaccaaaaaaguccacgucaucuucaacuacaaaggcaaaaacguccucaucaacaaagacauccgaugcaaagacgacgaauucacgcaccucuacacccucaucguaagacccgacaacacauacgaagucaaaauagacaacucccaagucgaauccggcucccuagaagacgacugggacuuccucccccccaaaaaaaucaaagaccccgacgcgagcaaacccgaagacugggacgaacgcgccaaaaucgacgaccccuaa

SEQ ID NO: 4079 - RNA, 891 nt, Artificial Sequence
  BAG65301 variant
augcacggagacagcgaguacaacaucauguucggacccgacaucugcggcccgggcacgaaaaagguacacgucauauucaacuacaaaggaaagaacgugcucauaaacaaggacauacgcugcaaagacgacgaguucacacaccuguacacgcucauagucaggcccgacaacacguacgaggucaagaucgacaacucacaaguggaaucgggaucgcucgaggacgacugggacuuccugcccccgaaaaagaucaaagacccagacgcgagcaagccagaggacugggacgagcgcgcgaaaauagacgaucccacggacucgaaaccggaagacugggacaaaccggaacacaucccggacccggacgcgaaaaagccagaggacugggacgaggaaauggacggggaaugggaaccgcccgugauccagaaccccgaauacaaaggggaauggaaaccgcgacagaucgacaacccggacuacaaagggaccuggauccaccccgagaucgacaacccggaauacagcccagaccccagcauauacgcauacgacaacuucggagugcuaggacucgaccuauggcaagugaaaucgggcacgauauucgacaacuuccugaucacgaacgacgaagcauacgcggaagaguucggaaacgaaacauggggcgugacaaaggcagcggaaaagcaaaugaaagacaaacaggacgaagaacagcgccugaaagaggaagaggaagacaaaaagcgcaaggaagaggaagaggccgaagacaaggaagaugacgaggacaaagacgaggacgaggaagacgaagaggacaaggaagaggacgaggaagaggacgugcccggacaagcgaaagacgaacuguga

SEQ ID NO: 4080 - RNA, 1254 nt, Artificial Sequence
  AAA36582 variant
augcuccucagcgugccccuccuacuaggacuacuugggcuagcagucgcagaaccagcaguguacuucaaagagcaauuucucgacggcgacggauggaccagccgcuggaucgagagcaaacacaaaagcgacuucggaaaauucguccuaagcagcggaaaauucuacggggacgaggaaaaagauaaaggacuccaaacaucccaagacgccagauucuacgcccugagcgccagcuucgaaccauucagcaacaaaggccaaacacucguagugcaauucacagucaaacacgaacaaaacauagacugcgggggcggguacgucaaacuauuccccaacagccuggaccaaaccgacaugcacggcgacagcgaauacaacauaauguucggacccgacauaugcgggccaggaacgaaaaagguccacgucauauucaacuacaaaggaaagaacguacucauaaacaaagacauacguugcaaagacgacgaguucacgcaccuguacacacugauagugaggccagacaacacauacgaagucaaaaucgacaacucacaaguagaaagcgggucccuagaggacgacugggacuuccuaccacccaaaaagaucaaagacccagacgcaagcaaacccgaagacugggacgaacgcgcaaaaauagacgaccccacagacucgaaaccagaagacugggacaaacccgaacacauaccggacccagacgcaaagaaaccagaagacugggacgaagaaauggacggagaaugggaaccaccagugauccaaaacccggaauacaaaggggaauggaaaccacgccaaauagacaacccggacuacaaagggacauggauccaccccgaaaucgacaaccccgaauacagcccggacccaagcauauacgcauacgacaacuuuggaguacucggccuagaccuauggcaaguaaaaagcggaacaaucuucgacaacuuccugauaacgaacgacgaagcauacgcagaagaguucgggaacgaaaccuggggcgugaccaaagccgcagaaaaacaaaugaaagacaaacaagacgaagaacagcgccuaaaagaggaagaggaggacaagaaacgcaaagaagaagaagaagcggaagacaaagaagacgacgaagacaaagacgaagacgaagaagacgaagaagacaaagaggaagacgaagaagaggacguacccggacaagcaaaagacgaauuguga

SEQ ID NO: 4081 - RNA, 1155 nt, Artificial Sequence
  BAB71655 variant
auggcccgcgcccuaguccaacucugggcaaucugcaugcuccgagucgcccucgccacagucuacuuccaagaagaauuccucgacggcgaacacuggcgcaaccgcuggcuacaaagcacaaacgacagcagauucggccacuuccgacucagcucaggcaaauucuacggccacaaagaaaaagacaaaggccuccaaaccacccaaaacggccgcuucuacgccaucagcgcacgcuucaaaccguucuccaacaaaggaaaaacacucgucauacaauacacaguaaaacacgaacaaaaaauggacugcggcggaggcuacaucaaagucuuccccgccgacauagaccaaaaaaaccucaacggaaagagccaauacuacauaauguucggccccgacaucugcggauucgacaucaaaaagguccacgucauacugcacuucaaaaacaaauaccacgaaaauaaaaaacuaauccgauguaaagucgacggcuucacccaccucuacacccuaauccuccgccccgaccuaucuuacgacgucaaaaucgacggacaaagcaucgaaucaggaucaaucgaauacgacuggaaccucacaagccucaaaaaggaaaccagcccagcagaaagcaaagacugggaacaaaccaaagacaacaaagcgcaagacugggaaaagcacuuccuagacgccagcaccagcaaacaaucagacuggaacggcgaccuggacggcgacuggcccgccccaaugcuccaaaaaccccccuaccaagacggccucaaaccagaaggcauccauaaagacgucuggcuccaccgcaaaaugaaaaacacggacuaccuaacacaauacgaccucagcgaauucgaaaacaucggcgccaucggacucgaacuauggcaaguacgcucaggcacaaucuucgacaacuuccucaucaccgaugacgaagaauacgccgacaacuucggcaaagcaaccuggggcgaaaccaagggacccgaacgcgaaauggacgccauccaggcaaaagaagagaugaaaaaagcccgcgaagaagaagaagaagaacuacucuccggcaaaaucaaccgccacgaacacuacuucaaccaguuccaccgacgcaacgaacuauaa

SEQ ID NO: 4082 - RNA, 330 nt, Artificial Sequence
  CAA10193 variant
augcugauggcacaggaggcgcuggcguucuugauggcgcaaggggcaaugcuggcggcacaggaaagaagagugccgagggcggcggaagugccgggggcacagggacagcaggggccgaggggaagggaagaggcgccgagagggguaaggauggcggugccgcuauugagaaggauggagggggcgccggcggggccgggagggaggacggcggcgugcuuuagcuguacaaguagaugucugaguaggaggccguggaaaaggagcuggagcgcggggaguugcccgggaaugccgcaucugaguccggaucaagggagauuuuga

SEQ ID NO: 4083 - RNA, 1440 nt, Artificial Sequence
  CAA66853 variant
auggacuucucccgcaaccucuacgacaucggcgaacaacucgacuccgaagaccucgccucccucaaauuccucucccucgacuacaucccccagcgcaaacaagaaccaauuaaagacgcccucaugcuauuccaacgacuccaagaaaaacgcaugcucgaagaauccaaccuaucauuccugaaagaacuccucuuccguaucaaccgccucgaccuccucauaacuuaucucaacacccgcaaagaagaaauggagcgcgaacuccaaacacccggccgagcccagauauccgccuaccgcguuaugcucuaccaaaucagcgaagaaguaucccgcucagaacuccgcucauucaaauuccuccuccaagaagaaaucuccaaaugcaaauuagacgacgacaugaaccugcucgauauauucaucgaaauggagaaaagggucauccuuggcgaaggcaaacucgacauccucaaacgcguaugugcccaaauaaauaaaucccuccuaaaaaucaucaacgacuacgaagaguucucaaaagaacgcagcagcucccucgaaggaucccccgacgaguucucaaacggggaagaacuaugcggugucaugaccaucuccgacucuccccgagaacaagacucagaaucccaaacgcucgacaaaguauaccaaaugaaaucaaaaccccgcggcuacugucucaucaucaacaaccacaacuucgccaaagcccgcgaaaaaguccccaaacuucauuccauacgagaccgcaacggcacgcaccucgacgcaggagcacuaacaacuaccuucgaagaacuccacuucgaaaucaaaccacacgacgacugcaccgucgaacaaaucuacgaaauccucaaaauauaccaacucauggaccacuccaacauggacugcuucauaugcugcauacuaucccacggagacaaaggaaucauauacggcacagacggacaggaagccccaaucuacgaacuaaccucacaauucacaggccucaaaugccccucccucgccggcaaaccuaaaguauucuucauccaggccugccaaggcgacaacuaucaaaaaggcauuccagucgaaaccgacucagaggaacaacccuaccucgaaauggaccucucuagcccccaaacccgcuacauccccgacgaagcagacuuccuccucggcauggccaccgucaacaacugcgucuccuaccggaaccccgccgaaggcacuugguauauacaaucccucugucaaucccuacgcgagcgcugcccccgcggcgacgauauccuaaccauccucacugaagucaacuacgaagucuccaacaaagacgacaagaaaaacaugggcaaacaaaugccccaacccacguucacacuccgcaagaaacucguguuccccuccgacuag

SEQ ID NO: 4084 - RNA, 1569 nt, Artificial Sequence
  CCDS2340.1 variant
augaaaucgcaaggccagcacugguauuccuccuccgacaaaaauugcaaaguauccuuccgcgaaaaacuacucaucaucgacuccaaccucggcguccaagacguagaaaaccucaaauuccugugcaucgggcucguccccaacaaaaaacuagaaaaaagcuccucagccucagacguauucgaacaccuccuagccgaagaccuccuuuccgaggaagacccauucuuccucgcagaauuacuguacaucauccgccaaaagaaacuccuacagcaccuuaacugcacgaaagaagaaguagaacgacuccuacccacuagacaacgagucagccucuucagaaaccuacuauacgaacucuccgaaggcaucgacucagaaaaccugaaagauaugaucuuccuccuaaaagacucacuacccaaaaccgaaaugaccucccucuccuuccuugcauuccucgaaaagcaaggcaaaaucgacgaagacaaccucaccugccucgaagaccuuugcaaaaccgucgucccuaaacuccuucgcaacaucgaaaaauacaaacgcgagaaggccauccaaaucguaaccccaccagucgauaaagaagcugaauccuaccaaggagaagaagaacucguaucccaaaccgacguuaaaaccuuccuagaagcccuaccccaagaauccuggcaaaacaaacacgccggcuccaacggcaaccgagccacaaacggcgccccaagccucgugucccgaggcaugcaaggugcaucagccaacacccucaacuccgaaaccucaacgaagcgcgcggccguauaccgcaugaaccgcaaucaccgaggccuaugcguaaucgucaacaaccacuccuucaccucccuaaaagaccgccaaggcacccacaaagacgccgaaauacuuagccacguauuccaaugguuaggcuuuaccguccacauacacaacaacgucaccaaaguagaaauggagaugguacuccaaaaacaaaaaugcaaccccgcccacgccgacggagacugcuucguguucugcauccucacacacggacgcuucggcgccgucuacuccagcgacgaagcccucauccccauacgagaaaucaugucccacuucacagcccuccaaugcccccgacuagccgagaaacccaaacuauucuucauacaggcaugccaaggagaagaaauacaaccauccgucucaaucgaggccgacgcccucaaccccgaacaagcgccaaccucccuccaagacucuauucccgccgaagcagacuuccuccucggacuggccaccguacccggcuacguaucuuucaggcacgucgaggaaggcagcugguacauccaaucgcuaugcaaccaccucaaaaaacucgucccccgucacgaagacauacucucaauccucaccgccgucaacgaugacgucucccgucgaguagacaaacaaggcacaaaaaaacaaaugccccaacccgccuucacacuccguaaaaaacucguauuccccguaccccucgacgcacucucccucuaa

SEQ ID NO: 4085 - RNA, 1020 nt, Artificial Sequence
  EAW65632 variant
auguggcaacucugggccucccuaugcugccuacucguacuagccaacgcccgaagccgaccauccuuccacccccucagcgacgaacucguaaacuacguaaacaaacgaaacacaaccuggcaagccggccacaacuucuacaacgucgacauguccuaccucaaacgccucugcggcacauuccucggagggcccaaaccaccccaacgcguaauguucacagaagaccuaaaacucccagccuccuucgacgccagggaacaauggccccaaugccccaccaucaaagaaauacgugaccaaggaagcugcggcuccugcugggccuucggcgccgucgaagccaucucagaccgaaucugcauacacaccaacgcccacgucagcgucgaagucagcgccgaagaccuccuaaccugcugcggaucuaugugcggggacggaugcaacggcggcuaccccgccgaagccuggaacuucuggacccgcaaaggccucguauccggcggacucuacgaaucccacgucggcugccgaccauacuccauuccacccugcgaacaccacgucaacggcucccgacccccaugcacaggcgaaggcgacacccccaaaugcagcaaaaucugcgaaccaggcuauagcccaaccuacaagcaagacaaacacuacggcuacaacuccuacucaguauccaacucagaaaaggacaucauggccgaaaucuacaaaaacggacccguagaaggcgcauucuccgucuacucagacuuccuccucuacaaauccggcgucuaccaacacguaaccggcgaaaugaugggagggcacgccaucagaauccuaggcuggggcgucgaaaacggcaccccauacuggcucgucgcaaacuccuggaacaccgacuggggcgacaacggauucuucaaaauacuccgcggccaagaccacugcggaauagaaucagaaguaguagccggcaucccucgaaccgaccaauacugggagaaaaucuaa

SEQ ID NO: 4086 - RNA, 1020 nt, Artificial Sequence
  AAC37547 variant
auguggcaacuaugggccucacucugcugccuccucguacucgcaaacgcccgcucgagacccagcuuccacccccuaucagacgaacucguaaacuacgucaacaaacgaaacacgaccuggcaagcaggccacaacuucuacaacguagacauguccuaccuaaaacgacuaugcggcacauuccuaggcggccccaaaccuccccaacgaguaauguucacagaagaccuaaaacuacccgccagcuucgacgcccgcgaacaauggccccaaugcccaaccaucaaagaaauccgcgaccaaggauccugcggaagcugcugggcauucggcgcaguagaagccaucuccgaccgcaucugcauacacaccaacgcgcacgucuccgucgaaguauccgcagaagaccuccuaacaugcugcggaagcaugugcggcgacggcugcaacggcggcuaccccgccgaagccuggaacuucuggacccgaaaaggccuagucuccggaggacuauacgaaucacacguaggcugcagacccuacuccaucccacccugcgaacaccacgucaacggcagcaggccacccugcaccggcgaaggcgacacccccaaaugcuccaaaauaugcgaaccaggcuacagcccaaccuacaagcaagacaaacacuacggcuacaacuccuacucagucuccaacuccgaaaaagacaucauggccgaaaucuacaaaaacggcccaguagaaggagccuucuccgucuacucagacuuccuccuguacaaaagcggcgucuaccaacaugucaccggcgaaaugaugggaggacacgccauacgaauccucggcuggggcgucgaaaacggcacccccuacuggcucgucgccaacuccuggaacaccgacuggggagacaacggcuucuucaaaauccuaagaggacaagaccacugcggaauagaauccgaaguagucgcaggcaucccccgaaccgaccaauacugggagaaaauauaa

SEQ ID NO: 4087 - RNA, 1002 nt, Artificial Sequence
  EAW62731 variant
augaaccccacgcucauacucgcggccuucugcuugggcauagccucggccacgcuaacguucgaccauucgcucgaagcccaguggacgaaauggaaagcaaugcauaauaggcucuauggaaugaacgaggaaggguggaggcgcgcggucugggaaaagaacaugaaaaugauagagcuccauaaccaggaauaccgcgagggaaagcacucguucacgauggcgaugaacgcauucggcgacaugacgagcgaggaguucagacaggucaugaacggguuccagaacaggaaaccgagaaagggcaagguauuccaagaacccuuauucuaugaagcacccagaagcguagacuggcgcgagaaaggguacguaacaccggucaagaaccagggccagugcgggagcugcugggcauucucagccacgggcgcgcucgagggccagauguuccgcaagaccgggcgauugaucucgcucucugaacagaaccugguagacugcucgggcccgcaagggaacgagggaugcaacggaggcuugauggauuacgcguuccaguacgugcaagauaacgggggccuggacucagaagagagcuaucccuaugaagcaaccgaggaaucaugcaaguacaauccaaaguacucggucgcgaacgacaccggauucguggacauacccaagcaagaaaaagcacucaugaaagcggucgcgaccguaggcccgaucucggucgcgauagacgccgggcacgagagcuuucuauucuacaaggaaggaaucuauuucgagcccgacugcucaagcgaggacauggaccacggcguacucguaguaggguacggguucgagagcacggaaucggacaacaacaaguacuggcuagugaaaaauagcuggggcgaggaauggggcaugggcggguacgugaaaauggccaaggacagacgaaaccacugcggcauagccucggccgcgagcuaucccacgguauag

SEQ ID NO: 4088 - RNA, 1002 nt, Artificial Sequence
  AAA66974 variant
augaaccccacgcucauacucgcagcauucugccuaggcauagcuucggccacgcucacguucgaccacucgcucgaggcccaguggacgaaauggaaagcgaugcacaacagacucuacggcaugaacgaggaaggauggaggcgcgcggucugggaaaagaacaugaaaaugauugaacuccacaaccaggaauaucgcgagggcaagcacucguucacgauggcgaugaacgccuucggcgacaugacgagcgaggaguuccgucaggucaugaauggauuccagaacaggaaaccgcgcaagggcaaggucuuccaagaaccauuguucuacgaagcgcccaggagcguggacuggcgcgagaaaggguacgugaccccggucaagaaccagggccaaugcgggagcugcugggcguucucggccacaggagcgcucgagggccagauguuccgcaagaccgggcgcuugaucucgcuaucggaacagaacuuggucgacugcucgggcccgcaagggaacgagggcugcaacggaggccuaauggacuacgcguuccaguacgugcaagacaacgggggccuggacuccgaagagagcuaucccuacgaagcaaccgaagaaucgugcaaguacaauccaaaguacucggucgcgaacgacaccggguucguggacauacccaagcaagagaaagcgcucaugaaagcggucgcgaccgugggcccuaucucagucgcaaucgacgccggacacgagagcuuucucuuuuacaaggaagggaucuacuucgagccagacugcucuagcgaggauauggaccacggcgugcuaguagucggguacggguucgagagcacggaaucugacaauaacaaguacuggcucgugaaaaacagcuggggcgaggaauggggcaugggaggguacguaaaaauggccaaagacaggcgcaaccacugcggaauagcaucggccgcgagcuacccaacggucuaa

SEQ ID NO: 4089 - RNA, 456 nt, Artificial Sequence
  AAG17239 variant
auggauuacgcguuccaguacgugcaagauaacgggggcuuggacucggaagagagcuaucccuaugaagcgaccgaggaaucgugcaaguacaaucccaaguacucggucgcgaacgauaccggguucguagacauacccaagcaagagaaagcgcucaugaaagcggucgcgaccgugggcccgaucucggucgcgaucgaugccgggcacgagagcuuucucuuuuacaaggaagggaucuauuucgagcccgauugcucgagcgaggacauggaccauggcgugcucguggucggguacggguucgagagcacggaaucggacaauaacaaguacuggcuagugaaaaacagcuggggcgaggaauggggcaugggcggguacgugaaaauggccaaggacaggcgcaaucacuguggcauagcaucggccgcgagcuaucccacggucuag

SEQ ID NO: 4090 - RNA, 984 nt, Artificial Sequence
  AAA51932 variant
augcuauuccuccuccucccccuacucgcaguacuacccggcgacggcaacgcugacggccucaaagaaccccucucuuuccacgucaccuggauagccuccuucuacaaccacucauggaaacaaaaccucgucucugguuggcucuccgaccuacaaacucacaccugggacuccaauuccucaaccaucgucuuccucugcccauggucccgaggcaacuucuccaaugaggaauggaaagaacuugaaacacucuuccgcauacgaaccauccgcuccuucgaaggcauccgccgcuacgcccacgaacuacaauuugaauaccccuucgaaauccaagucaccggcggcugcgaacuccacucaggcaaagucuccggcuccuuccuccaacucgccuaccaaggcuccgacuucguuuccuuccagaacaacuccuggcuacccuaucccgucgccggcaacauggcaaaacacuucugcaaaguacucaaccaaaaccaacacgaaaacgacaucacucacaaccuacucuccgacacaugcccccgcuucauccucggccuccucgacgccggcaaagcccacuuacaacgccaagucaaacccgaagccuggcucucccacggccccucacccggccccggccaccuccaacucgucugccacgucucuggcuucuaccccaaacccgucuggguuauguggaugcgcggcgaacaagaacaacaaggcacccaacgaggagacauacuccccuccgccgacggcacuugguaccuccgcgcaacccucgaaguugccgccggagaggccgcagaccuauccugccgaguaaaacacuccucccucgaaggacaagacauaguccuauacugggaacaccacuccuccgucggcuucauuauccucgccgucaucguaccacuacuacuccucauaggacucgcacucugguuccgcaaacgcugcuucugcuaa

SEQ ID NO: 4091 - RNA, 1002 nt, Artificial Sequence
  AAA51939 variant
augcuacuacuccccuuccaacuacucgccguccucuuccccggcggcaacuccgaacacgcauuccaaggccccaccuccuuccacgucauccaaaccuccuccuucaccaacuccaccugggcccaaacacaaggcuccggcuggcucgacgaccuacaaauccacggcugggacuccgacuccggcaccgccaucuuccuaaaacccugguccaaaggcaacuucuccgacaaagaaguagccgaacuugaagaaaucuuccgagucuacaucuucggcuucgcccgcgaaguccaagacuucgcaggcgacuuccaaaugaaauaccccuucgaaauacaaggcaucgcaggcugcgaacuccacucaggcggcgccauuguuucauuucuccgcggcgcacucggcggccucgacuuccuauccgucaaaaacgcauccugcguccccucccccgaaggcggcucucgagcacaaaaauucugcgcacucauaauacaauaccaaggcaucauggaaaccguccgaauccuccucuacgaaaccugcccccgcuaccuccucggcguccuaaacgccggcaaagccgaccuacaacgccaagucaaacccgaagccuggcucuccuccggucccagcccaggccccggaagacuccaacucguaugccacgucuccggcuucuauccaaaacccgucuggguaauguggaugcgcggcgaacaagaacaacaaggcacccaacucggcgacauccuccccaacgccaacuggaccugguaccuacgcgcuacccucgacgucgccgacggagaggccgcaggccucagcugccgagucaaacacucuucacucgaaggccaagacaucauacucuacuggcgaaauccgacauccaucggcuccaucguacucgccaucauagucccuucccuccuacuccuccuaugccuagcccucugguacaugcgccgccgcagcuaccaaaacaucccauaa

SEQ ID NO: 4092 - RNA, 1002 nt, Artificial Sequence
  AAI26466 variant
augcuauuccuccaauuccuacuccuagcccuccuccuccccggcggagauaacgccgacgcaucccaagaacacgucagcuuccacguaauccaaaucuucucauucgucaaccaaucuugggcccgaggccaaggcuccggcuggcucgacgaacuacaaacccacggcugggacuccgaauccggcacuauaaucuuccuacacaacuggucaaaaggcaacuucuccaacgaagaacuauccgaccuagaacuccuguuccguuucuaccuuuucggccuaacccgcgaaauccaagaccaugccucacaagacuacuccaaauaccccuuugaaguccaagucaaagccggcugcgaacuccacuccggcaaaucccccgaaggauucuuccaaguugccuucaacggacucgaccuccuauccuuccaaaacaccaccuggguccccucccccggcugcggaucucucgcccaaagcguaugccaccucuuaaaccaccaauaugaaggcgucaccgaaacagucuacaaccucauccgauccacuugcccccguuuccuacucggacuccucgacgccggcaaaauguauguccaccgccaaguacgacccgaagccuggcucagcucccgccccucccuuggcuccggccaacuccuacucguaugccacgccuccggcuucuaccccaaacccguaugggucaccuggaugcgaaacgaacaagaacaacucggcaccaaacacggcgacauccugcccaacgcugacggcacaugguaccugcaagucauccuagaagucgccucugaagaaccagcaggccuauccugccgaguccgccacuccucccucggcggccaagacaucauccucuacuggggccaccacuucuccaugaacuggaucgcccucgucgucaucgucccccucgucauccuuaucguccuaguacucugguucaaaaagcacugcuccuaccaagacauacucuaa

SEQ ID NO: 4093 - RNA, 1008 nt, Artificial Sequence
  AAA59672 variant
augggcugccuccucuuccuucuccuaugggcacuacuccaagccuggggcuccgccgaagucccacaacgacucuucccccuccggugccugcaaauuucaucauucgccaacuccagcuggacccgcaccgacggccuagccuggcucggcgaacuccaaacacacuccugguccaaugacucagacaccguccgcucccucaaaccauggucccaagggaccuucuccgaccaacaaugggaaacccuccaacacaucuuccgagucuaccgcuccuccuucacccgcgacgucaaagaguucgccaaaaugcuacgccucuccuacccacucgaacuacaagucuccgcagggugcgaaguucaccccggaaacgccucaaacaacuucuuccacgucgcguuccaaggcaaagacauccucagcuuccaaggcaccuccugggaaccaacccaagaagccccccugugggucaaccucgccauccaaguccucaaccaagacaaauggacccgcgagaccguacaauggcuacucaacggcaccugcccccaguucgucagcggccuccuagaaucaggcaaauccgaacuaaaaaaacaagucaaacccaaagccuggcucucccgaggccccucccccggcccaggcagacuccuccuagucugccacguaucaggcuucuaccccaaacccgucugggucaaauggaugcgaggcgaacaagaacaacaaggcacacaacccggugacauccugccaaacgcagacgaaaccugguaccuccgagccacccuagacgucgucgccggcgaagccgccggacucuccugccgcgucaaacacuccucucucgaaggccaagacaucguccucuacuggggcggcuccuauacaucaaugggacuaaucgcccuugccguccucgccugccuacucuuccuacuaaucgucggcuucacaucccgcuucaaacgccaaacauccuaccaaggcguacucuaa

SEQ ID NO: 4094 - RNA, 1167 nt, Artificial Sequence
  EAW52830 variant
augcuccuccuguuccuccucuucgaaggccuuugcugccccggcgaaaacacagcagccccccaagcccuccaauccuaccaccuagccgccgaagaacaacucuccuuccgcaugcuccaaaccucaucauucgccaaccacuccugggcccacuccgaaggcuccggauggcucggcgaccuccagacccacggcugggacacaguccucggcacaauccgcuuucucaaacccuggucucacggcaacuucuccaaacaagaacuaaaaaaccuccaaucccucuuccagcucuacuuccacuccuucauccaaaucguccaagcaucagcaggccaauuccaacucgaauaccccuucgaaauccaaauucucgcaggcugccguaugaacgccccccaaaucuuccucaacauggccuaccaaggcucagacuuccuauccuuccaaggaauuuccugggaacccucccccggcgccggaauacgcgcccaaaacaucugcaaaguccucaaccgauaccuagacaucaaagaaauccuucaaucccuccucggccacaccugcccccgcuuccuagcgggacucauggaagccggcgaaagcgagcuaaaacgcaaaguuaaacccgaagccuggcuuuccugcgguccaucccccggccccggacgccuccaacucgucugccacgucagcggcuucuaccccaaaccagucuggguaauguggaugcguggagaacaagaacagcgcggcacccaacgcggagauguccuccccaacgccgacgaaaccugguaccuacgagccacccuagacgucgccgccggcgaagccgccggacucuccugccgcgucaaacacuccucacucggcggccaugaccucaucauccacuggggcggcuacuccaucuuccucauccucaucugccuuaccgucauagucacccucguuauccucguagucgucgacagccgacuaaaaaaacaaucaagcaacaaaaacauccucucaccccacacacccucccccgucuuccucaugggcgccaacacccaggauaccaaaaacucccgacaccaauucugccuugcccaagucuccuggaucaaaaaucgcguacucaaaaaauggaaaacacgacucaaccaacuaugguaa

SEQ ID NO: 4095 - RNA, 894 nt, Artificial Sequence
  AAA35581 variant
augaccacaccccgcaacuccgucaacggcaccuuccccgccgaacccaugaaaggccccaucgccaugcaaucuggcccaaaaccccucuuccgccgcauguccucccuaguaggccccacccaaucauucuucaugcgcgaaucaaaaacccucggagcaguccaaaucaugaacggccucuuccacaucgcccucggaggccuccucaugauccccgccggcaucuaugcacccaucugcgucacagucugguacccccucuggggcggcauaauguacauaaucuccggcucccuccucgccgccaccgagaaaaacucccgcaaaugccucgucaaaggcaaaaugaucaugaacucccucucccucuucgccgccaucucgggcaugauccucuccaucauggacauccuaaacaucaaaaucucccacuuccucaaaauggaaucccucaacuucauccgcgcccacacccccuacaucaacaucuacaacugcgaaccagccaaccccuccgaaaagaacucccccuccacccaauacugcuacuccauccaaucacucuuccuaggaauacuaucagucaugcucaucuucgccuucuuccaagaacucgucaucgccggcaucgucgaaaacgaauggaaacgaaccugcucccgcccaaaaucaaacaucguccuccucuccgccgaagaaaagaaagaacaaacaaucgaaaucaaagaagaagucgucggccucaccgaaacauccucacaacccaaaaacgaagaagacaucgaaaucauccccauccaagaagaagaagaagaagaaaccgaaaccaacuuccccgaaccgccccaagaccaagaauccucccccauagaaaacgacucaagccccuaa

SEQ ID NO: 4096 - RNA, 1989 nt, Artificial Sequence
  AAC18956 variant
auggaaagcaaaaccgaaaaauggauggaacgcauccauuuaaacgucucagaaagaccuuucccaccccacauacaacuacccccagaaauccaagaaucccaggaagucacccugacgugcuuacuaaauuucucauguuacggcuacccaauacaacuccaguggcuccuagaaggagucccaaugcgccaagcagcagucacuagcacaucacucacaaucaaguccgucuucacacgcucagaauuaaaauucucaccccaauggucccaccacggaaaaaucguaaccugccaacuccaagacgccgacggaaaguuccugucaaacgacaccguccagcugaacgucaaacacacucccaaacuagaaaucaaagucacaccauccgaugccauaguucgagaaggcgacuccgucaccaugaccugcgaaguauccucaaccaauccggaguacacaaccgucuccuggcuaaaagacggaaccucgcuaaagaaacaaaacacguucacccucaaccuccgcgaagugaccaaagaccaauccggcaaauacugcugccaagucagcaacgacgucggccccggccgcuccgaagaaguauuccuccaaguccaauacgcccccgaacccucaaccguccaaauccuacacucacccgcggucgaaggaucacaggucgaguuccucugcaugucccucgccaacccccuacccaccaacuacaccugguaccacaacggcaaagaaaugcaaggccgaacagaagagaaaguacacauacccaaaauccuccccuggcacgccggcaccuacucuugcgucgccgaaaacauccucggcacaggacaacgcggcccgggcgccgaacuggacguccaauauccacccaagaaagucacuacugucauccaaaaccccaugcccauacgcgaaggcgacaccgucacucuguccugcaacuacaacuccucaaacccuaguguaacacgcuacgaauggaaaccccacggcgcaugggaagaaccgucgcucggcguccucaaaauacaaaaagucggaugggacaacacaacaaucgccugcgcaagaugcaacucauggugcuccugggccucaccuguagcccuaaacgugcaauacgcgccacgugacgucagaguacgcaaaauaaaaccccucuccgaaauucacuccggcaacuccguaagccuccaaugcgacuucucuagcucucacccaaaagaaguacaauucuucugggagaaaaacggacgacuccucgguaaagaaucccaacucaacuucgauagcauaucccccgaagacgcaggcucauauuccuguugggucaacaacucaauaggccaaaccgcaagcaaagccuggacacucgaaguccuauacgcaccgcgacgccuccgcgucagcauguccccgggcgaucaaguaauggaagguaaaagcgccacacuacguugcgaauccgacgccaacccucccgucagccacuacaccugguucgacuggaauaaccaaucacuacccuaccacucgcaaaaacuacgacuugaacccguaaaaguccaacacuccggcgcuuacuggugccaaggcaccaacuccgucggcaaaggacggucaccccucucaacccuaaccgucuacuacucacccgaaacgauuggacgcagggucgccgucggacucggcucgugccuagccauccuaauccucgcaauaugcggccugaaauuacaaaggcgcgacgcagaaucauccgaaaugcaacgcccgccacgaaccugugacgacacugucacuuacagcgcacuucauaaacgccaagucggcgacuacgaaaacguaaucccagauuuccccgaggacgaaggcauccacuauagcgaguuaauccaauucggcgucggcgaacgaccccaagcccaagaaaacgucgacuaugucauccucaaacacuaa

SEQ ID NO: 4097 - RNA, 2544 nt, Artificial Sequence
  AAB06448 variant
augcaccuacucggcccuuggcuccuccucuuaguccucgaauaccuagcauucucugacaguuccaaauggguauuugagcacccagagacccucuacgccugggaaggcgccugcguuuggauuccaugcacauaucgcgcacucgacggagaucucgagucauucauacuauuccauaaucccgaguacaacaaaaacacaagcaaauucgacggcacccgccuauacgaauccacgaaagauggcaagguacccuccgaacaaaaacgcguacaauuccuaggagacaagaacaagaacugcacacugucaauacaccccguccaucucaacgacagcggccaacuaggccugcgcauggagagcaaaacagaaaaauggauggaacgcauccaccuaaacguauccgaaaggcccuucccaccacacauccaacucccaccagaaauccaagaaucgcaagaagucacgcuaacaugccuccuaaacuucaguugcuacggcuaccccauccaacuacaauggcuacucgagggcgugccaaugagacaagcggcagucacaucaacaagccucaccaucaaaagcguuuucacacgauccgagcuaaaauucagcccccaauggagccaccacggaaaaaucguaacuugccaacuccaggaugccgacggcaaauuccucuccaacgacacgguccaacucaacguaaaacacacaccaaaacuagaaaucaaaguaaccccauccgacgccauaguaagagagggugacucagucacaaugaccugcgaagucucgagcucaaacccggaauacaccacaguuuccuggcucaaggacggcaccucccucaagaaacagaauaccuucacacugaaccuucgagaaguaacgaaagaccaauccgggaaauacugcugccaggucuccaacgacgucgggcccggucgauccgaagaaguuuuccuccaaguacaauacgcacccgaacccucaaccguacaaauccuucauuccccggccguagaagguagccaagucgaguucuuaugcaugagccucgcuaacccacugccaaccaacuacaccugguaucacaacggcaaagaaaugcaaggacgcacagaagaaaaaguacauaucccuaaaauucuacccuggcacgccgggaccuacucaugcguagccgaaaacauccuuggaacaggacaacgcggccccggcgcagaacucgacguacaauauccucccaagaaagugaccacugucauccaaaaccccaugcccauucgcgaaggcgauaccguaacacugagcugcaacuacaacucaucgaacccauccgucacacgauacgaauggaaaccacauggcgccugggaagaacccagccuaggcguuuuaaaaauucaaaauguaggcugggacaacacaacgaucgccugcgcagccugcaacagcugguguucaugggcuagccccguagcccucaacguacaguacgccccaagagacguacggguacgaaaaaucaaaccgcucucagaaauccacucaggcaacagcgucucacuccagugcgacuucucauccucacacccuaaagaaguccaauucuuuugggagaaaaacggacgccuucucgggaaagaaucgcaacucaacuuugacuccauauccccagaagacgcaggcagcuauagcuguugggucaacaacucaauagggcaaacagcauccaaagcauggacucuugaaguacucuacgccccacgccggcuccgcgucuccaugucaccaggagaucaagucauggaaggcaaaagcgcaacccucaccugugaaucagacgccaaucccccggucagccacuacaccugguuugauuggaacaaccaaucccugcccuaccacagccaaaagcuccgccuagaacccguaaagguccaacacucaggcgccuacuggugccagggcaccaacucagucgguaaaggacgaagcccacuuuccacgcuuaccgucuacuacucccccgagacuauagguagacgcguagcagucggacuuggcagcugccucgcuauccugauccucgcaauaugcggacucaaacuccagagacgcuggaaacggacccaaucccaacaaggucuccaggagaacuccuccggccagagcuucuucguccguaacaagaaaguccgcagagcaccccucuccgagggcccccacagccuggguugcuacaacccuaugauggaagacggcaucucauauaccacacuacguuuccccgagaugaacaucccacgcacaggcgacgccgaauccuccgaaaugcaacgacccccacccgacugcgacgacaccgucacauacuccgcacuccacaaacgucaaguuggcgacuacgaaaacgucauacccgacuuccccgaggacgaaggaauacacuacucggaacugauccaauucggagucggcgaaagaccacaagcccaagaaaacgucgacuacgucauacucaaacacuag

SEQ ID NO: 4098 - RNA, 2544 nt, Artificial Sequence
  ABK41939 variant
augcaccuccuuggccccuggcuacuacuacucguccuagaguaccuagccuucagcgacuccucgaaauggguauucgaacaccccgaaacccucuacgcaugggagggagccugcguuuggaucccguguacauaccgagcccucgacggcgaccucgaguccuucauccucuuccacaacccagaauacaacaaaaacaccagcaaguucgacgggacccgccuauaugaaaguacgaaggacgggaaagucccauccgaacaaaaacgaguacaauuucugggagacaaaaacaaaaacugcacacucucaauacaccccgugcaccucaacgacuccggccagcugggacuacguauggaguccaaaaccgaaaaauggauggaaagaauccaccucaacguaagugagagacccuuucccccacacauccaacuacccccagaaauccaggaaucccaagaagucacccucacaugccugcucaauuucuccugcuacggcuaccccauacagcuccaguggcuccuggagggagucccaaugcgacaggcugccgucaccagcaccucccucaccaucaaauccgucuucacaagguccgaacuaaaauucuccccgcaauggucucaucacggaaaaaucguaaccugccaacuucaagacgcagacggcaaauuccucucgaacgacacgguccaauuaaacguaaaacacaccccgaaauuagaaauaaaaguaacaccuagcgacgccaucguacgagaaggagacuccguuacaaugacuugcgaaguaagcuccucaaaccccgaauacaccacggucucguggcuaaaagauggcacaucacuaaagaaacaaaacacauucacccucaaccuccgcgaaguaacaaaagaccaauccggcaaauacugcugccaaguaucaaacgacgucggccccggccgcagugaggaagucuuccuacaaguccaauaugcacccgaacccuccacuguccaaauccugcacucucccgccguggagggcagccaagucgaauuucucugcaugagccuagcaaauccccucccuacaaacuacaccugguaucacaauggcaaagaaaugcaaggcaggaccgaagaaaaaguacauauccccaaaauccuccccuggcacgccggcaccuacuccugcgucgccgaaaacauccucggcaccggccagagaggccccggugcugaacucgacguacaauacccacccaagaaagucaccaccgucauacaaaaccccaugccaauccgcgaaggcgauaccgucacccucaguugcaacuacaacuccucuaaccccucggucacacgcuacgaauggaaaccacacggcgcgugggaagaacccucccucgggguacucaaaauccaaaacgucggcugggacaacacgaccauagccugcgccgccugcaacuccuggugcuccugggcaucuccaguagcccuaaacguccaguacgcaccccgcgacguccgaguaaggaaaauaaaaccccucuccgaaauacacucagguaacuccgucucccuucaaugcgacuucaguucaucgcaccccaaagaaguccaauucuucugggagaaaaacggccgccuccucgggaaagaaucgcaacuaaauuucgacuccaucucccccgaagacgccggaucauacucaugcugggucaauaacuccauaggacaaacggcaaguaaggcguggacccucgaaguauuauacgcuccccgcagacugagaguaucaaugucuccuggcgaucaagucauggaaggcaaauccgccacccuaaccugcgaaucggacgcaaacccacccgugucccacuacacgugguucgacuggaacaaucaaucucuccccuaccacagccagaaacuccgacucgaaccagucaaaguacaacacuccggagcauacuggugccaaggcaccaacucggucggcaaaggucgcaguccccucaguacacucacagucuacuacucacccgaaaccauuggcagacgcgucgcggucggucucggcuccugccuggccauccucauccucgccauuugcggccucaaauuacaacgccgauggaagcgaacacaaucccaacaaggccuccaagagaacuccucaggccaguccuucuucgugcggaacaagaaaguccgacgagccccacuaagcgaaggcccccacucacucggaugcuacaaccccaugauggaagauggaaucuccuauaccacccuccguuucccugaaaugaacauacccagaacaggagacgccgaaucgucagagaugcaacgcccaccacccgacugcgacgacaccguaacuuauucggcacuacacaaacgccaagucggcgacuacgaaaacgucauucccgacuuccccgaagacgaaggcauccacuacuccgaacuaauccaauuuggcguaggagaaaggccucaagcccaggaaaaugucgacuauguaaucuuaaaacacuaa

SEQ ID NO: 4099 - RNA, 1605 nt, Artificial Sequence
  CAE47548 variant
augcuacgcagacgcggauccccagguaugggcguccacguaggcgcagcccucggcgcccugugguucugucucacuggcgcacucgaaguacaaguacccgaagacccaguugucgcccucgucggaacagacgcaacacucugcugcuccuucucuccugaacccggauucagccucgcccaacuuaaucucaucuggcaacucacagacaccaaacaacucguacacucauucgccgaaggacaagaccaaggcuccgcauacgccaaucgaaccgcccuauuccccgaccuacuugcccaaggaaacgcaucccuccgccuucaacgcguucgcgucgccgacgaaggcagcuucacaugcuucgucuccauccgcgacuucggauccgcagcaguaucccuccaaguagccgcaccauacuccaagccaucaaugaccuuagaacccaacaaagaccuacgaccaggcgacaccguaaccauaaccugcucauccuaccaaggcuacccagaagcggaaguuuucuggcaagacggccaaggcguaccccucaccggcaacgucaccacaagucaaauggccaacgaacaaggccuauucgacguccacuccauccuccgagucguccuaggugccaacggaacauacuccugccuuguucgcaaccccguccuccaacaagacgcacauuccuccgucaccauaacuccacaacgaucccccaccggcgccgucgaaguccaagucccugaggaccccguagucgcccucguaggaaccgacgcaacccuacgcugcucauucaguccagaaccagguuucucacuagcacaacuaaaucugaucuggcagcucaccgacaccaaacagcucguacacucauucacugaaggccgcgaccaaggcuccgccuacgccaaccgcacagcccuauucccagaucuacuugcccaaggcaacgccucccuacgccuacaacgcguccgagucgcagacgaaggauccuuuaccugcuucgucagcaucagagacuucggcuccgccgcagugucccuccaaguagccgccccauacuccaaacccuccaugacccuugaacccaacaaagaccuccgcccaggcgacaccguaaccauaacaugcucaagcuacagaggguacccagaagccgaaguuuucuggcaagacggccaaggcguucccuugaccggaaacguaaccaccucacaaauggccaacgaacaaggccucuucgacguccacucaguccuacgcguagugcuuggagccaacggcaccuauucaugccucguccgcaaccccgucuuacagcaagacgcccauggcuccgucacuaucacuggccaaccuaugaccuucccuccagaagccuuaugggucaccgucggccucucagucugccucaucgcccuccuagucgcacuagcauucgucugcuggcgcaagaucaaacaauccugcgaagaagaaaacgccggcgccgaagaccaggacggagaaggagaaggcucaaaaacagcccuacaaccacuuaaacacuccgacucaaaagaagacgacggccaagaaauagcauga

SEQ ID NO: 4100 - RNA, 639 nt, Artificial Sequence
  BAG57312 variant
augccccuccuccuccuacucccccuucucugggcagaccucacacaccgccccaaaauccucauccccggcacccucgaacccggccacuccaaaaaccucacaugcuccgucuccugggccugcgaacaaggcaccccacccaucuucuccuggcucuccgcagcacccaccucccuaggcccccgcaccacccacucauccguccucaucaucacaccccgaccccaagaccacggcaccaaccuaaccugccaagucaaauucgccggcgccggcguaaccaccgaacgaaccauccaacucaacgucaccuacgucccccaaaaccccaccaccggcaucuuccccggcgacggcucaggcaaacaagaaacacgcgccggcgucguccacggcgccaucggcggcgccggcgucaccgcccuccucgcccuaugccucugccucaucuucuucaucgucaaaacacaccgccgcaaagccgcccgcaccgccgucggccgcaacgacacccaccccaccaccggcuccgccucccccgucuccgacggcgcauccuggcaccccguaugcccagccgacaccucaucccaaugcggcccacccuccugccccauacaacauuuccaaaacuaa

SEQ ID NO: 4101 - RNA, 1095 nt, Artificial Sequence
  AAK83654 variant
augccccuccuccuccuccucccccuccucugggccggcgcccucgcaauggacccaaacuucuggcuccaaguucaagaauccgucaccguacaagaaggacucugcguccucgucccaugcaccuucuuccaccccauccccuacuacgacaaaaacucccccguccacggcuacugguuccgugaaggcgcaaucauaucccgcgacucccccgucgcuaccaacaaacucgaccaagaaguccaagaagaaacucaaggccgcuuccgccuacuuggcgaccccagccgcaacaacugcucccuauccaucgucgacgcccgccgccgcgauaacggcuccuacuucuuccgcauggaacguggcagcaccaaauauagcuacaaaucgccccaacucuccguacacguaacugaccucacccaccgcccaaaaauccucaucccaggcacccucgaacccggccauuccaaaaaccuaaccugcuccgucuccugggcuugcgaacaaggaacaccgcccaucuucucuuggcucuccgccgcaccaaccucccucggaccccgcacaacccacucauccguccucaucauaaccccacgcccccaagaccacggcaccaaccucacaugccaagucaaauucgccggagccggcguaacaaccgaacgaaccauccaacuaaacgucacauacgucccccaaaaccccaccacuggcaucuucccaggcgacggauccggcaaacaagaaaccagagccggcguaguccacggcgccauaggcggagcaggcgucacagcccuccuagcacuaugccuaugccucaucuuuuucaucgucaaaacccaucgccgaaaagccgcccgcaccgcaguaggccgcaacgacacccacccaacaacaggaucagcuagcccaaaacaccaaaagaaauccaaacuacacggcccaaccgaaaccuccucaugcuccggagccgcccccaccguagaaauggacgaagaacuccacuaugccucccucaacuuccacggaaugaaccccucaaaagacaccuccaccgaauauuccgaaguacgcacacaauaa

SEQ ID NO: 4102 - RNA, 1095 nt, Artificial Sequence
  CAD36509 variant
augccccuacuccuccuccucccacuucucugggccggcgcccucgccauggaccccaacuucuggcuccagguccaagaauccgucaccguccaagaaggccucugcguacuuguccccugcaccuucuuccaccccauacccuacuacgacaaaaacucucccguccacggcuacugguuccgcgaaggcgcaaucaucucucgcgacucccccgucgccaccaauaaacucgaccaagaaguccaagaagaaacccaaggccgauuccggcuacuaggcgaccccucucgcaacaacugcucccuauccaucgucgacgcccgccgacgagacaacggcuccuacuucuuccgcauggaacgcggcuccaccaaauacucauacaaauccccccaacuaucaguucacgucaccgaccucacacaccgcccaaaaauacucauccccggcacacucgaacccggacacucaaaaaaccuaaccugcuccguaucaugggccugcgaacaaggaaccccacccaucuucuccuggcucuccgccgcccccaccucccucggcccacgaaccacccacucaucuguccucaucauaaccccacguccccaagaccacggcacaaauuuaaccugccaagucaaauucgccggcgccggcgucaccaccgaacgcaccauacaacuaaacgucaccuacgucccacaaaaccccaccaccggcaucuuccccggcgacggauccggaaaacaagaaacccgcgcaggagucguccacggcgccaucggcggcgcuggaguaacagcacuccucgcccucugccucugccucauuuucuucaucgucaaaacccaccgcagaaaagcagcucgcacagccguaggacgcaacgacacccaccccacaaccgguuccgccucccccaaacaccaaaaaaaaucaaaacuccacggccccaccgaaaccucauccugcuccggcgccgcccccaccgucgaaauggacgaagaacuccacuacgccagccucaauuuccacggcaugaacccaucaaaagacaccucaaccgaauacucagaaguacgcacacaauaa

SEQ ID NO: 4103 - RNA, 624 nt, Artificial Sequence
  AAA52295 variant
augcagagcgggacccauuggagggucuugggcuugugccugcucucggucggggucuggggccaggacgggaacgaggaaaugggcggaaucacgcaaacgcccuacaaagugagcauaagcggaaccacggucauacucacguguccgcaauaucccgggagcgagaucuuguggcagcacaaugacaagaacauaggcggagacgaggacgauaaaaauaucgggagcgacgaagaucacuugagcuugaaagaguucucggaacuagaacagagcggguacuaugucuguuacccacgcgggagcaagccagaggacgcgaacuuuuacuuguacuugcgcgcgcgcgugugcgagaacugcauggagauggaugucaugagcguggccacgaucgugaucguggacauaugcauaaccgggggcuugcucuugcuaguguacuauuggucgaaaaaccgaaaggccaaggcaaagcccgugaccaggggagcgggcgcgggagggcgccagcgcgggcaaaauaaagagcgaccgcccccgguaccgaacccggacuacgaaccaaucaggaaaggacaaagggacuuauacucaggcuugaaccagagaagaaucuag

SEQ ID NO: 4104 - RNA, 495 nt, Artificial Sequence
  AAH25703 variant
augaaauggaaagcacuauucaccgcagccauccuacaagcccaacuccccaucaccgaagcccaauccuucggacuccucgaccccaaacucugcuaccuccucgacggcauccucuucaucuacggcgucauccuaaccgcccuauuccuccgaguaaaauucucacgcagcgcagacgcccccgccuaccaacaaggccaaaaccaacucuacaacgaacucaaccucggccgccgcgaagaauacgacguccucgacaaacgccgaggccgcgaccccgaaaugggcggcaaaccccaacgccgcaaaaacccccaagaaggacucuacaacgaacuccaaaaagacaaaauggccgaagccuacuccgaaaucggcaugaaaggcgaacgccgacgcggcaaaggccacgacggccuauaccaaggccucuccacagccaccaaagacaccuacgacgcccuccacaugcaagcccuccccccccgcuaa

SEQ ID NO: 4105 - RNA, 2229 nt, Artificial Sequence
  CCDS7897.1 variant
auggacaaauucugguggcacgccgccuggggucucugccucgucccucucucucuagcccaaauagaucuaaacaucacaugccgcuucgccggcgucuuccacguugagaaaaacggacgcuacucuauaucccgaaccgaagccgccgaccucugcaaagcauuuaacuccacccuccccacuauggcccaaauggaaaaagcccucuccaucggguuugaaacaugccgauacggcuucaucgaaggccacguagucaucccccgcauacaccccaauucuauaugcgccgccaacaacaccggcgucuacauauuaaccucaaacacaucacaguacgacacuuacugcuucaacgcaucagcgcccccagaagaagacuguaccuccguaaccgaucuucccaacgcauucgacggaccaaucaccaucacaauaguaaaccgcgacggaacacgcuacguccaaaaaggagaguaccguacaaacccagaagacaucuaccccagcaaccccacagacgacgacgucucgucaggaucuagcucggaacgaucuuccacgucaggaggcuacauauucuacaccuucuccacaguccacccgaucccagacgaagacucacccuggaucacagacuccaccgaucgcaucccugccaccacccugauguccaccagcgccaccgcaacugaaacggccaccaagagacaagaaacgugggacugguuuuccuggcucuuucuacccagcgagagcaaaaaccaccuccauaccacaacccaaauggcaggaacaucaucaaacacaauaucggcgggcugggaacccaacgaagaaaacgaagacgaacgcgaucgacacuuaucauucuccggcuccggcaucgacgacgacgaagacuucauauccagcaccauaucaacaacaccccgcgccuucgaccacaccaaacagaaccaagacuggacccaauggaacccaucucacuccaaccccgaaguccuucuccaaacaaccaccagaaugacugauguagacagaaacggcaccacagccuacgaaggcaacuggaacccagaagcacacccuccccuuauccaccacgaacaccaugaagaagaagaaacaccccacuccaccuccaccauacaagcuacccccucuucaaccaccgaagaaacagcaacccaaaaagaacagugguucggcaaccgcuggcacgaaggcuaccgccaaacaccgaaagaagacucccacuccaccacugguacagcagcagccuccgcccacacaagccaucccaugcaaggacgcaccaccccguccccagaagacagcuccuggaccgacuuuuucaacccaaucucccacccaaugggccgaggccaccaagccggccgcaggauggauauggacuccagccacagcaucacccuccaaccaacagccaaccccaacacaggacucgucgaagaccucgaccgaaccgggccacuguccaugacuacccaacaauccaacucccaguccuucuccacuucccacgaaggacuagaagaagacaaagaccacccaacuaccucgacacucaccuccagcaacagaaaugacgucacagguggacgacgcgacccaaaccacagcgaaggaucaaccacacuccucgaaggauacaccucccacuacccgcacaccaaagaaagccguacauucaucccaguuacaucugcuaaaacaggcagcuucggagucacagcagucacagucggcgauagcaacucgaacgucaaccgcucccucucaggcgaccaagacaccuuccaucccagcggugguucccacaccacccacgguucagaaucagacggccacucccacggcucccaagaaggcggcgccaauacaaccucaggucccauccgaacgccccaaauacccgaaugguugauaauccuugcuagccuucucgcacuggcacucauccuagccguuugcauagccgucaacucccgccgacgauguggacagaaaaagaaacugguuauaaauucaggcaacggcgcggucgaggaccgcaaacccucaggccucaacggcgaagccuccaagucccaagaaaugguucaccuagucaacaaagaauccuccgaaacccccgaccaauucaugaccgcugacgaaacccguaaccuccaaaacguugacaugaagaucggggucuaa

SEQ ID NO: 4106 - RNA, 2100 nt, Artificial Sequence
  XM_006718388.1 variant
auggacaaauucugguggcacgcggcauggggccucugccuugucccacucucacuggcccaaauagaucuaaacaucacaugccgcuucgcaggcgucuuucacgucgaaaaaaacggacgcuacucaaucucccgaaccgaagccgcagaccucuguaaagcauuuaacagcacccuccccaccauggcccaaauggaaaaagcacuuaguaucgguuucgaaaccugccgcuacggauuuauagaaggacacguagucaucccccgcauccaccccaacuccaucugcgccgccaacaacacaggcgucuauauacucacaucaaacacgucccaauacgacaccuacugcuuuaacgccucagccccaccggaagaagacugcaccagcguaaccgaccuuccaaacgccuucgacggccccaucaccauaaccaucgucaaccgcgacggcacccgcuacguccaaaaaggcgaauaccgcaccaaccccgaagauauauaccccagcaacccaacagacgacgacguauccucaggcuccuccucagaacgauccucaacaagcggcggcuacaucuucuacaccuucucaaccgugcaccccauccccgacgaagacucacccuggaucaccgacuccacugaccgcauaccagccacaacccuuaugaguaccucugccacagccaccgaaacagccaccaaaagacaagaaacuugggacugguucagcuggcuauuccucccuagcgaauccaaaaaucacuuacacaccaccacccaaauggccggcacauccucaaacaccauaucagcagguugggaacccaacgaagaaaacgaggacgaacgcgaucgacaccucagcuucuccgguucaggcauagacgacgacgaggacuucaucuccuccacaaucucaaccacuccacgcgccuuugaccacacaaaacaaaaucaagacuggacccaauggaacccgucccauuccaaccccgagguccuccuccagaccaccacgagaaugaccgacgucgacagaaacgguacaaccgccuacgaaggcaauuggaacccagaagcccaccccccucuaauccaccacgaacaccacgaagaagaagaaacaccacacucgaccuccacaaccgccucagcucauaccucucacccaaugcaaggucgcacaacccccucacccgaggacucgucuuggacagacuucuuuaaccccaucucacaccccaugggccgaggacaccaggcuggucgacgaauggacauggacuccucucauuccaucacacuccaacccacagccaaccccaacaccggccuagucgaagaucucgaccgcaccggcccccucucaaugacaacccaacaaagcaacucccaaaguuucucaaccucacacgaaggacuugaagaagacaaagaccaccccaccaccucaacccuuaccuccucaaaccgaaacgacgucacaggaggacgccgcgaccccaaccacucugaaggcucaacaacccuccuagaaggauacaccucccacuacccacacaccaaagaauccaggaccuucauccccguaaccucagcgaaaaccggcuccuucggugucaccgcaguaacagucggcgacagcaacucaaacguaaaucguucacuauccggugaccaagacaccuuccacccaucgggcggaucccacaccacccacggcuccgaaucagacggccacucccacggcucccaagaaggaggcgccaacaccacgagcggacccauccgaaccccacaaauacccgaaugguuaauaauacucgccagccuacucgcccuagcccuuauccuagccguaugcaucgccguaaacucacgcagacgaugcggccaaaaaaaaaaacuaguaauaaacagcggcaacggggcggucgaagaccgcaaaccaucaggccucaacggcgaagcaagcaaaucccaagaaaugguccaccuagucaacaaagagucaucagagaccccagaccaauucaugaccgccgacgaaacacgcaaccuccaaaaugucgacaugaaaaucggcgucuga

SEQ ID NO: 4107 - RNA, 1377 nt, Artificial Sequence
  AAA35572 variant
augaaccgcggcguccccuuuagacaccuccuacucguacuccaacucgcccuccuacccgccgcaacacaaggcaagaaagucguacucggcaagaaaggcgacaccgucgaacuaaccugcaccgccagccaaaagaaaucaauucaauuccacuggaaaaacucaaaccaaaucaaaauccuaggaaaccaaggaucguuuuuaaccaaaggcccgagcaaacucaacgaccgagccgacagccgacgaagccucugggaccaaggcaacuucccccucaucaucaaaaaccucaaaaucgaagacuccgacaccuacaucugcgaaguagaggaccaaaaagaggagguacaacuccucgucuucggucucaccgccaacuccgacacccaccuccuccaaggccaaucccucacccucacacuagaaucacccccaggcuccagcccaucaguccaaugccgcuccccacgcggcaaaaacauccaaggaggcaaaacccucagcguaagccaacuagagcuacaagacucaggcaccuggacgugcacgguccuacaaaaccaaaagaaagucgaguucaaaaucgacauagucguacucgcuuuccaaaaagcguccucgauagucuacaagaaagaaggcgaacaagucgaguucagcuuuccacuagccuucaccgucgaaaaacucacaggcuccggcgaacucugguggcaagccgaacgugcaucguccuccaaaucuuggaucaccuucgaucucaaaaacaaagaaguaucggucaaacgaguaacacaagaccccaaacuccaaaugggcaagaaacuaccacuccaucucacccuaccccaggcccucccacaauacgccggaucaggaaaccucacgcucgcccuggaagcgaaaacaggcaaacuccaccaagaagucaaccuagucgucaugcgcgccacgcaacuccagaaaaaccuaaccugcgaaguauggggccccaccucucccaaacucaugcucucccuaaaacuagaaaacaaagaagccaaaguaagcaaacgcgaaaaagcagucuggguccuaaaucccgaagcaggcauguggcaaugccugcuauccgacuccggccaaguccuacucgaauccaacaucaaaguccucccaacaugguccaccccgguccaacccauggcccuaauaguacucggaggagucgccggccuacuccuauucaucggccucggaaucuucuucugcguccgaugccgacaccgccgccgccaagcggaacgcaugucccaaaucaaacgccuccucagcgagaaaaagacaugccaaugcccacaccgauuccaaaagaccugcucucccaucuag

SEQ ID NO: 4108 - RNA, 186 nt, Artificial Sequence
  CAA44323 variant
augaaacgcuuccucuuccuccuccucaccaucucccuccucgucaugguccaaauccaaaccggccucuccggccaaaacgacaccucccaaaccuccucccccuccgccuccuccaacaucuccggcggcaucuuccucuucuucgucgccaacgccaucauccaccucuucugcuucuccuaa

SEQ ID NO: 4109 - RNA, 186 nt, Artificial Sequence
  AAP35780 variant
augaaacgcuuccucuuccuccuccucaccaucucccuccucgucaugguccaaauccaaaccggccucuccggccaaaacgacaccucccaaaccuccucccccuccgccuccuccuccauguccggcggcaucuuccucuucuucgucgccaacgccaucauccaccucuucugcuucuccuaa

SEQ ID NO: 4110 - RNA, 186 nt, Artificial Sequence
  ACS44650 variant
augaaacgcuuccucuuccuccuccucaccaucucccuccucgucaugguccaaauccaaaccggccucuccggccaaaacgacaccucccaaaccuccucccccuccgccuccuccaacaucuccggcggcaucuuccucuucuucgucgccaacgccaucauccaccuauucugcuucuccuaa

SEQ ID NO: 4111 - RNA, 954 nt, Artificial Sequence
  EAW93489 variant
augacaguugcccgccccuccgucccagccgcccucccccuccucggcgaacucccccgacuccuacuacucguccuccucugccuccccgccgucuggggagacugcggccuaccccccgacgucccaaacgcccaaccugcccuagaaggccgaacauccuuccccgaagacaccgucaucaccuacaaaugcgaagaauccuucgucaaaauccccggcgagaaagacuccgucaucugccucaaaggcucccaaugguccgacaucgaagaauucugcaaccaaaaaucaugcccaaacccaggcgaaauacgcaacggccaaaucgacguccccggcggaauccucuucggagccaccaucuccuucuccugcaacaccgguuacaaacucuucggcucaacauccuccuucugccucaucucaggcuccucaguccaaugguccgacccacucccagaaugccgagaaaucuacugcccagcacccccacaaauagacaacggcauaauccaaggcgaacgcgaccacuacggcuaccgacaaucagucaccuacgccugcaacaaaggcuucaccaugaucggcgaacacuccaucuacugcaccguaaacaacgacgaaggcgaauggucaggccccccccccgaaugccgcggcaaaucccuaaccucaaaagucccccccaccguacaaaaacccaccaccgucaacguccccaccaccgaagucucaccaaccagccaaaaaaccacuaccaaaaccaccacaccaaacgcccaagccacucgcucaaccccaguaucccgcaccaccaaacacuuccacgaaaccacccccaacaaaggcuccggcaccaccuccggaaccacccgccuacucuccggccacaccugcuucacccuaaccggccuacucggcacccuagucaccaugggccuacucaccuaa

SEQ ID NO: 4112 - RNA, 882 nt, Artificial Sequence
  EAW93497 variant
augauaggcgaacacucgaucuacugcaccgucaacaacgacgaaggugaauggucaggcccaccacccgaaugccgcggaaaaucccucaccuccaaagucccacccaccguccaaaaacccaccaccguaaacguccccaccaccgaagucucccccaccucccagaaaacaaccaccaaaaccacaacucccaacgcccaaggaaccgaaacccccucaguccuccaaaaacacacaaccgaaaacgucucagccacacgcacaccacccaccccacaaaaacccaccaccgucaacguccccgccaccaucgucacccccacaccccaaaaacccacaacaaucaacguacccgccaccggcgucuccucaacaccccaacgucacaccaucgucaaugucuccgccaccggaacccuacccacccuacaaaaacccacccgcgccaacgacuccgccaccaaaucaccagccgccgcccaaaccuccuucaucucaaaaacacucucaaccaaaacccccuccgccgcccaaaaccccaugaugaccaacgccucagcaacacaagccacccucaccgcccaaaaauucaccaccgccaaagucgccuucacccaaucccccuccgccgcucgaaaaucaaccaacguccacucucccguaacaaacggccuuaaauccacccaacgcuuccccuccgcccacauaaccgccacccgcucaacccccgucucccgcaccaccaaacacuuccacgaaaccacacccaacaaaggcuccggcacaaccucagguaccacccgacuccuauccggccauaccugcuucacccucaccggccuccucggaacccucgucaccaugggccuccucaccuaa

SEQ ID NO: 4113 - RNA, 804 nt, Artificial Sequence
  EAW93493 variant
augaucggcgaacacuccaucuacugcaccgucaacaacgacgaaggcgaaugguccggacccccccccgaaugccgaggcaaaucccuaaccucaaaagucccacccacuguacaaaaacccaccaccgucaacguccccacaaccgaaguaucccccaccucccaaaaaacaacuaccaaaaccacaacccccaacgcccaaggcaccgaaacccccucaguccuucaaaaacacacuaccgaaaacgucuccgcaacccgaaccccccccaccccacaaaaaccaaccaccgucaacguaccagccacaauugucaccccuaccccccaaaaacccacaacaaucaacgucccagccaccggagucucauccaccccccaacgccacaccaucgucaacgucuccgccaccggaacacucccaacccuccaaaaacccacccgagccaacgacuccgccaccaaauccccagcagccgcccaaaccucauucaucuccaaaacccucuccaccaaaaccccuuccgcagcccaaaaccccaugaugaccaacgccuccgcaacccaagccacccucaccgcccaaaaauucacaacagccaaagucgccuucacccaaucccccagcgccgcccccacccgcuccaccccagucucccgcacaaccaaacacuuccacgaaaccacccccaacaaaggcucaggcaccaccuccggcaccacacgccuccucucaggccacaccugcuucacccuuaccggccuacuagguacccucgucacaaugggccuacucaccuaa

SEQ ID NO: 4114 - RNA, 1146 nt, Artificial Sequence
  AAA52168 variant
augaccgucgcacgcccauccguccccgcagcccuaccccuccucggcgaacuuccacggcuacuccuccucguacugcucugccucccagcagucuggggcgacugcggccucccgcccgacguccccaacgcccaaccugcccucgaaggccgcacuuccuuccccgaagacaccguaauaaccuacaaaugcgaagaauccuucgucaaaauacccggcgaaaaagacagcgucaucugucuuaaaggcucccaaugguccgacaucgaagaauucugcaaccgcucaugcgaagucccaacccgccucaacuccgccucccucaaacaacccuacauaacacagaacuacuuccccguaggaacaguagucgaauacgaaugccgccccgguuaccgccgagaacccucccuaagccccaaacuaaccugccuccaaaaccucaaauggucuaccgcaguagaauucugcaaaaaaaaauccugcccaaaccccggagaaauccgaaacggccaaaucgacguacccggcggaauccucuucggcgcuaccaucuccuucuccugcaacaccggauacaaacucuucggcuccaccuccuccuucugccucaucucagguuccuccguccaauggucagacccacuccccgaaugccgcgaaauauacugccccgcccccccccaaaucgacaacggaaucauccaaggagaacgggaccacuacggauaccgacaauccguaaccuacgcaugcaacaaaggcuucaccaugauuggcgaacacuccauauacugcaccgucaacaaugacgaaggcgaauggucaggccccccacccgagugccgcggcaaaucccuuacauccaaagucccacccacaguacaaaagccaacaacagucaacguacccaccaccgaagucagccccaccucccaaaaaaccaccaccaaaaccaccacccccaaugcccaagccacccgcagcacacccguaucccgaaccacaaaacacuuccacgaaaccacaccaaacaaaggaucuggcaccacaucaggcaccacccgacuacucuccggccacaccugcuucacccucacuggccuacucggcacccuagucacaaugggccuccuuacauaa

SEQ ID NO: 4115 - RNA, 2577 nt, Artificial Sequence
  CCDS73385.1 variant
augcuccaaaccaaagaccuuaucuggacccucuucuuucuaggaaccgcaguaucccuucaggucgacauugugccgagccaaggagagaucagcgugggcgaaucaaaauucuuccucugucaaguagccggggacgcuaaagacaaagacauauccugguucagccccaacggugaaaagcucacgccaaaccagcagcggaucuccgucguauggaacgacgacagcagcucaacccugacaaucuacaacgcaaacaucgacgacgccggcaucuacaaaugcguuguaacaggagaggacggcuccgaaucagaagccacgguaaacguaaagaucuuccagaaacuaauguuuaaaaacgcccccaccccgcaggaguuccgcgaaggcgaagacgcggucauaguuugcgacguggucagcucccucccgccgacaauaaucuggaagcacaaaggacgcgauguaauccucaagaaagacguacgcuucauaguccugucaaacaacuaccuacaaauacgcggaauaaagaaaaccgacgaaggaacauacagaugcgaagggagaauacucgcgcgcggggaaaucaacuucaaagacauacaagugauaguaaacgucccgcccacaauccaagcccgccaaaacauaguaaacgcaacggccaaccucggacaaagcgugacccucguaugugacgcugaagguuuucccgaacccacaauguccuggaccaaagacggcgaacaaaucgaacaagaagaagacgacgaaaaauacaucuucagcgacgacagcucccaacucacuauaaagaaagucgacaaaaacgacgaagcggaauacaucugcaucgccgaaaacaaagcaggagaacaagacgccacaauccaccucaaagucuucgcaaaaccaaaaaucacauacgucgaaaaccaaacagcaauggaauuagaggagcaagucacccucacaugcgaggccuccggcgacccaauaccguccauaaccuggcgcaccagcaccagaaacauaucauccgaggaaaaagccagcuggacacgcccagagaaacaagaaacacuggacggacacaugguagugcggucccacgcccgcgucagcagcuuaacacucaaaagcauccaauacacagacgccggagaauacaucugcacagcuuccaacacaaucggacaagacagccaaagcauguaccucgagguccaauacgcccccaaacuacaaggacccguagcaguauacacaugggaaggcaaccaaguaaacauaaccugcgaaguauucgcauauccaagcgccaccaucagcugguuccgcgacggacagcuacuacccuccuccaacuauucgaacaucaagaucuacaauaccccgagcgccuccuaucuggaagucacccccgacagcgaaaacgauuucggaaacuacaacuguacugccgucaaccgaaucggccaggaaucgcuagaguucauucuaguccaagccgacacacccuccuccccaagcaucgaccaaguagaacccuacagcuccacagcccaaguacaauucgacgaaccagaagccacaggaggagucccgauacucaaauauaaagccgaauggcgggcggucggcgaagaaguauggcacucaaaaugguacgacgccaaagaagccagcauggagggaauaguaacgauugucggccugaaaccagaaaccacauacgccguucgccucgccgcacucaacggaaaagggcuaggggagaucagcgcagcaucggaauuuaaaacacaaccgguccaaggcgaacccagcgcgcccaagcuagaaggccaaaugggcgaagacggcaacucaaucaaagucaaccuuaucaaacaagacgacgggggaucaccaauccgccacuaccuaguacgauaccgagcacucuccucagaguggaagcccgaaauccggcucccguccgggucagaucauguaaugcugaaaucgcucgacuggaacgccgaauacgaagucuacguagucgccgagaaccaacaggggaaaagcaaggcugcacacuucguauucagaaccagcgcacaaccaaccgccauacccgcaaacggcucacccaccagcggccucagcaccggagcaaucgugggaauccuaauugucauauuuguccuccuucuggucguaguagacauuaccugcuacuuccucaauaagugcggauuauucaugugcaucgcagucaaccucugcgguaaggccggcccaggagcgaaaggaaaagacauggaagaaggaaaagcagccuucagcaaggacgaaagcaaagaacccaucgucgaaguccgaaccgaagaagaaagaaccccuaaccaugacgguggcaaacacacagaaccaaacgagacaacaccccuaaccgagccagagaaagggcccgucgaagcuaagccggaaugccaagaaacagagaccaaacccgcaccagcagaaguaaagacgguccccaaugacgccacacaaacaaaagaaaacgaaagcaaggcauaa

SEQ ID NO: 4116 - RNA, 867 nt, Artificial Sequence
  ABK41933 variant
augggccacacccgccgccaagguacaucccccuccaaaugccccuaccucaacuucuuccaacuccucguacucgccggccucucccacuucugcucaggcgucauccacgucacgaaagaagucaaagaagucgcaacccucuccugcggacacaacgucuccgucgaagaacucgcccaaacccgcaucuacuggcaaaaagagaaaaaaaugguccucacaaugauguccggcgacaugaacaucuggcccgaauacaaaaaccgcacuaucuucgacaucaccaacaaccucucaaucguaauccucgcacuccgacccucagacgaaggcaccuacgaaugcgucguacucaaauacgaaaaagacgccuucaaacgcgaacaccucgccgaagucacccucuccgucaaagcagacuuccccacacccuccaucuccgacuucgaaauccccaccuccaacauccgccgcauuaucugcuccacuuccggaggcuuccccgaaccccaccuauccuggcucgaaaacggagaagaacucaacgcuaucaacaccaccgucucacaagaccccgaaaccgaacucuacgccgucucauccaaacucgacuucaacaugaccaccaaccacucauucaugugccucaucaaauacggccaccuucgagucaaccaaaccuucaacuggaacaccaccaaacaagaacacuuccccgacaaccuacuccccuccugggcaaucacccucaucucagucaacggcauauucgucaucugcugccucaccuacugcuucgcaccccgcugccgcgaacgccggcgcaacgaacgccuccgacgcgaauccguccgccccgucuaa

SEQ ID NO: 4117 - RNA, 867 nt, Artificial Sequence
  AAA36045 variant
augggccacacccgccgccaaggcaccucccccucaaaaugcccauaccucaacuucuuccagcuccucguccucgccggccucucucacuucugcuccggagucauacacgucaccaaagaggucaaagaaguugccacccucucaugcggccacaacgucuccgucgaagaacuagcccaaacccgcaucuacuggcaaaaagaaaaaaaaaugguacucacgaugauguccggcgacaugaauaucuggcccgaauacaaaaaccgcaccaucuucgacaucaccaacaaccucuccaucguuauccucgcccuccgccccuccgacgaaggcaccuacgaaugcgucguccucaaauacgaaaaagacgccuucaaacgcgaacaccucgccgaagucacccucuccgucaaagcagacuuccccaccccuuccauaagcgacuucgaaauccccaccucaaacauacgccgcaucaucugcuccaccucgggcggauuccccgaaccccaccucuccuggcuagaaaacggcgaagagcucaacgccaucaacaccaccgucucccaagaccccgaaaccgaacucuacgcaguauccuccaaacucgacuucaacaugaccaccaaucacuccuucaugugccucaucaaauacggccaccuacgcgucaaccaaacauucaacuggaacaccaccaaacaagaacacuuccccgacaaccuccuccccuccugggccauaacccucaucuccgucaacggaaucuucgucaucugcugccucaccuacugcuucgccccacgcugccgagaacgccgccgcaacgaacgccuacgacgagaaucaguccgaccagucuaa

SEQ ID NO: 4118 - RNA, 990 nt, Artificial Sequence
  CCDS3009.1 variant
auggacccacaaugcacaaugggccuguccaacauccucuucguaauggccuuccuccuaucaggcgccgccccccucaaaauccaagcauacuucaacgaaaccgccgaccuacccugccaauucgccaacucacaaaaccaaucacucuccgaacuagucgucuucuggcaggaccaagaaaaccucguccuuaacgaaguauaccucggcaaagaaaaauucgacuccguccacagcaaauacaugggacgaacauccuucgacuccgacuccuggacccuccgccuccacaaccuccaaaucaaagacaaaggccucuaccaaugcaucauccaccacaaaaaacccaccggcaugauccgaauacaccaaaugaacuccgaacucuccguccuagccaacuucucucaacccgaaaucgucccaaucuccaacaucacagaaaacguauacaucaaccuuaccugcagcucaauccacggcuaccccgaacccaaaaaaauguccguccuacuccgcacaaaaaacuccaccauagaauacgacggcgucaugcaaaaaucccaagacaacguaacagaacucuacgacgucagcaucucccucuccgucuccuuccccgacguaaccucaaacaugacaaucuucugcauccucgaaaccgacaaaacccgccuccucuccucccccuucuccaucgaacucgaagacccccaaccaccccccgaccacauccccuggaucaccgccguccuccccaccgucaucaucugcgucauggucuuuugccuaauccuauggaaauggaaaaaaaaaaaacgcccccgcaacucauacaaaugcggcacaaauaccauggaaagagaagaaagcgaacaaacaaagaaacgagaaaaaauacacauccccgaacgcuccgacgaagcccaacgcguauucaaguccuccaaaaccuccuccugcgacaaauccgacaccugcuucuaa

SEQ ID NO: 4119 - RNA, 708 nt, Artificial Sequence
  AAA59674 variant
auggcacuccccgucaccgcccuacuccuaccccucgcccuacuccuacacgcagcccgccccucccaauuccgagucucaccccucgaccgcaccuggaaccucggcgaaaccgucgaacucaaaugccaaguccuccucuccaaccccaccuccggcugcucauggcuauuucaaccccgcggcgccgccgccucccccacauuccuacucuaccucucccaaaacaaacccaaagccgcugaaggccucgacacccaacgcuucuccggcaaacgccucggcgacaccuuuguccucacccucuccgacuuccgacgagaaaacgaaggcuacuacuucugcuccgcccucuccaacucaauaauguacuucucacacuucguccccgucuuccuccccgccaaacccacuaccacccccgcaccccgcccacccacaccagcccccacuauugccucgcaaccacucucccuccgucccgaagccugccgccccgccgccggcggcgccguccacacacgcggccuugacuucgccugcgacaucuacaucugggcaccccuagccggaaccugcggcguccuccuacucucccucgucaucacccuauacugcaaccaccgcaaccgccgccgcgucugcaaaugcccccgcccagucguaaaaucaggcgacaaacccucccucuccgcccgauaugucuaa

SEQ ID NO: 4120 - RNA, 2472 nt, Artificial Sequence
  EAW57688 variant
augaccguccuucaagaacccguacaagcagcaauauggcaagcucucaaccacuacgcauaccgcgacgcggucuuccucgcagaacgucuauacgcagaagugcacucggaagaagcccuuuuucuccucgcuaccugcuauuaccgcucaggcaaagccuauaaagcguaccgguuacuaaaaggccacuccugcaccaccccacagugcaaguaucuccuagcaaaaugcugugucgaccucuccaaacuugccgaaggagaacaaauccuauccggcggcguguucaacaaacaaaagucacacgacgacauaguaacagaguucggugauucugccuguuucacccuaucauuacuaggccauguauacugcaagacugacagacuagcaaaaggcuccgaaugcuaccaaaagucccucucccuuaaccccuuucuauggucacccuucgaaucgcucugcgaaaucggagaaaaaccagaccccgaccaaaccuucaaauucaccucccuccagaacuucuccaacugccuacccaacuccugcacaacccaaguaccaaaccacucccucucccaccgccagcccgaaaccguccucacagaaacaccacaggacaccauagaacucaaccgacucaaccuagaaucaagcaacagcaaauacucgcucaacacagacagcuccgucucauacaucgacucugccguaauauccccggacaccguaccacucgguacaggcaccagcauccucucuaaacaaguacaaaacaagcccaaaaccggcagaucacugcucggcggccccgccgcacuuucaccccucacaccguccuucggaauccucccccucgaaaccccuuccccaggagacggguccuaucuccaaaacuacaccaacaccccacccgucaucgacgucccauccaccggcgcccccuccaagaaauccgucgcaagaauuggccaaacaggcacuaaaucagucuucucccaguccgguaacucucgcgaagucacccccauacuugcccaaacucaaucaucuggcccucaaaccucaaccacuccccaagugcuaucccccaccaucaccuccccacccaacgcccucccccgcagaucgagccgccuguucacuucugacuccagcaccacgaaagaaaacucgaagaaacucaaaaugaaauucccaccaaaaaucccaaaccgaaaaaccaaguccaaaacgaacaaagggggcaucacucaaccaaauauaaaugauucucuggaaaucacaaaacucgacagcucgauuaucuccgaaggcaaaaucucuaccauaaccccacaaauccaagcauucaaccuccaaaaagccgccgcaggccucaugagccuccuccgcgaaauggguaaaggguaccucgcccuauguuccuauaacugcaaagaagcaauaaacauccuuagccaucugcccucucaccacuacaacaccggcuggguacugugccaaauaggccgcgcuuacuucgaacucuccgaauacaugcaggccgagagaauauucagcgaaguaagacgaauagaaaacuaccgugucgaaggcauggaaauauacuccaccacccuauggcaucugcaaaaagacgucgcccucuccguacucucgaaagaccucacagacauggauaaaaacucccccgaggcguggugcgcagcagguaacugcuucucacuccaacgagaacacgauauagccaucaaauucuuccaaagggcaauccagguagaccccaacuacgcuuaugcauauacgcuacuuggccacgaguucguccucacagaagaacuagauaaagcccucgcaugcuuuagaaacgcaauccgcguuaacccccgccacuacaacgcaugguacggauuaggaaugaucuacuacaaacaggaaaaauucucccuagccgaaaugcacuuccaaaaagcccuugacaucaacccccaauccaguguccuacucugccacaucggcgucguucaacacgcccuuaagaaaucagaaaaagcacucgacacccuaaacaaagcaaucgucaucgaccccaaaaacccccuaugcaaauuccaccgcgccucgguccucuucgccaacgaaaaauauaaauccgcgcuccaagaacucgaagaacucaagcagaucguccccaaagaaucucucgucuacuuccuaaucggaaagguguauaagaaacuaggacaaacccaccuagcccuaaugaauuucagcugggccauggaccuugauccgaaaggcgccaacaaccaaaucaaggaagccaucgauaaacgauaccuccccgacgacgaagaaccaauuacacaagaggaacaaauuaugggcacagacgaaucgcaggaaucuuccaugacagacgcagacgacacacaacuccacgcggccgaaucugaugaguucuag

SEQ ID NO: 4121 - RNA, 2475 nt, Artificial Sequence
  AAB34378 variant
augaccguccugcaggaaccuguacaagccgccauuuggcaagcccucaaccacuacgcauaccgagacgcugucuucuuagcagaacgucucuacgcagaaguucacagcgaagaagcauuauuccuccuggcgacaugcuacuaccgcucaggcaaggcuuacaaagcauacagacuccuuaaaggccacuccugcacaacaccccaaugcaaauaucuccucgccaaaugcugcguugaccuaucgaaacucgcugagggcgaacaaauccuauccggcggcguguucaacaaacaaaagucccacgacgacaucguuaccgaguucggagauuccgccugcuucacacugucccuacucggacacguuuacugcaaaaccgaccgccuagcaaaaggauccgaaugcuaccaaaaaucccucucacucaacccuuuccucuggucacccuucgaaucccucugcgaaauaggagaaaaacccgaccccgaccaaacauucaaauucaccucacuccaaaacuucuccaacugccuacccaauucgugcaccacccagguuccaaaucacuccuugagucaccgacaacccgaaaccguccuaacugaaacuccccaagacaccaucgaacucaaccgucucaaccuggaaucaucuaacucgaaguacucccucaacaccgacucauccgucucauacaucgacagcgccgucaucucacccgacaccguuccacucgggaccggcaccucaauccucucuaaacaaguacaaaacaaacccaaaaccggaagaucacuccuaggcgguccggccgcccuaucaccccuaacccccuccuucggaauccuaccgcucgaaacaccuagccccggcgaugguucuuaccuacagaacuacaccaacacucccccugucauagaugucccaagcaccggagcaccuagcaagaaauccgucgccagaauaggccaaaccgguacaaaauccgucuucucacaaagcgggaacucccgcgaagugacgccaauacucgcccaaacacaaucauccggcccccaaaccuccacaacgccccaaguccucagccccaccaucaccuccccacccaacgcccucccacgccgaucuucacgccuauucaccuccgauuccagcaccaccaaagaaaacuccaagaaacucaaaaugaaauucccucccaaaauacccaaccgcaaaaccaaauccaaaaccaacaaaggcggaauaacccaacccaacauaaacgauucccucgaaaucaccaagcuagacuccuccauaaucuccgaaggaaaaaucucgaccaucacuccccaaauccaagccuucaaccuccaaaaagccgcugcagaaggccugaugucccugcuccgugaaaugggcaaagguuaccucgcccucugcucguacaacugcaaagaagccaucaacauccucucacaccucccaucccaccacuacaacaccggauggguccucugucaaauaggccgagcauacuucgaacuauccgaguacaugcaagccgaacgaauauucucugaagucagacgcauugaaaacuaccgaguagaaggaauggaaauauauucgaccacauuguggcaucuucaaaaagacguugcccuuucgguccuaucaaaagaccugacagacauggacaaaaacucgcccgaagcauggugugccgccggaaacugcuucagccuucaacgcgaacacgacauugcaaucaaauucuuucaacgagcgauccaagucgaccccaacuaugcguacgccuacacccuacuuggccacgaguucguucuuaccgaagaacuagacaaagcccucgccuguuuucgcaacgcuauacgugucaacccucgccacuacaacgccugguacggacucggcaugauauacuacaaacaagaaaaauuuagccucgccgaaaugcacuuccaaaaagcucucgacaucaacccacaaucauccguacuucucugucacaucggaguaguccaacacgcgcugaagaaauccgaaaaagcauuggacacccuaaauaaagccaucgugauugaccccaaaaacccacucugcaaauuccaccgcgcguccgucuuauucgcaaacgaaaaauacaaaucagcucugcaggaacuagaagaacucaaacagaucguccccaaagaaucccuuguauacuuccucaucgguaaggucuacaagaaacuuggccaaacacaccuugcacuaaugaacuucucaugggccauggaucucgaccccaaaggcgcaaacaaucaaauaaaggaagccaucgacaaacgauaccuacccgacgacgaagaacccaucacccaagaagaacaaauaaugggcacugacgaaucacaagaauccuccaugacagacgccgacgacacacaacuucacgccgccgaaucugacgaguucuag

SEQ ID NO: 4122 - RNA, 1788 nt, Artificial Sequence
  AAA51947 variant
augcgaguccuccucgcugcccuaggccuccucuuccucggcgcgcuccgagccuucccccaagacagaccauucgaggauaccugccauggaaacccaucccauuacuacgacaaagccguacgacgauguugcuacaggugcccaaugggcuuauucccaacacaacaaugcccgcaacgaccuacagacugccguaaacaaugcgagcccgacuacuaccuagacgaagccgaucgcugcaccgcgugcguaaccugcucccgugacgaccuagucgagaaaaccccuugcgcauggaacucaagccgcgucugcgaaugccgccccggcauguucugcucaaccucagccgucaacagcugcgccagaugcuucuuccacucgguuugcccagcaggcaugaucgucaaauucccuggcacagcacaaaagaacaccgugugcgaaccugccucaccaggcgucagcccagccugcgccuccccagaaaacugcaaagaaccaucaucaggaacuauuccacaagccaaacccacaccaguaucaccagccaccagcagcgcauccaccaugccaguacgcggcggcacacgccucgcccaagaagccgccucaaaacucacaagagcacccgacucacccagcucagucggacgcccuucaucagaccccggccucuccccgacccaacccuguccugaagguucaggagacugccgaaaacaaugcgaaccagacuacuaucucgacgaagccggccgaugcacugccugcgucucaugcucucgcgaugaccuugucgagaaaacccccugcgcauggaacaguucccgaacaugcgaaugccgcccaggcaugaucugcgccaccucagccaccaacucaugcgcccgcugcguacccuacccaaucugcgccgccgaaaccgucacuaaaccacaagacauggccgaaaaagauaccacauucgaagccccaccccuaggaacccaacccgacugcaaccccacacccgaaaacggcgaagcccccgccuccacaagcccaacucaaucacuccuagucgacucccaagccucaaaaacccuccccaucccaacaucagccccugucgcgcuaagcuccaccggcaaacccguccuagacgccggacccguacuauuuugggucauccucguacuggucguugucgucggcagcuccgccuuccuccucugccacagacgcgccugccggaaacgcauccgacaaaaacuacaucucugcuacccaguccaaaccucccaaccaaaacucgaacucgucgacagccgacccagacguucaucaacccaacuucgaagcggcgcuuccgucaccgaaccaguggccgaggaacggggccucaugucucaaccccucauggaaacaugccacuccguaggggcagccuaccucgaaucacucccccuccaagacgccuccccagccggaggacccucuagcccccgcgaccuucccgaaccccgaguaagcaccgaacacacaaacaacaaaaucgagaaaaucuacaucaugaaagccgacacaguuaucgucggaaccgucaaagcagaacuccccgaaggucguggccuagccggacccgccgaacccgaacucgaagaagaacucgaagccgaccacacgccucauuaccccgaacaagaaaccgaaccaccccuaggcuccugcuccgacguuaugcuauccgucgaagaagaaggaaaagaagacccacuacccaccgccgcguccgggaaauaa

SEQ ID NO: 4123 - RNA, 912 nt, Artificial Sequence
  EAW97060 variant
auggccaccucccgcuacgaaccaguagccgaaauaggcgucggcgccuacggcaccgucuacaaagcacgcgacccccacuccggucacuucgucgcccucaaaagcguccgaguccccaacggaggcggcggcggcggcggccuccccaucuccacaguccgcgaagucgcccuccuccgacgccuagaagccuucgaacaccccaacguaguccgacucauggacguaugcgccaccucccgcaccgaccgcgaaaucaaagucacccuagucuucgaacacgucgaccaagaccuccgaacuuaccucgacaaagccccaccacccggccuccccgccgaaaccauaaaagaccucaugcgucaauuucuccgcggacuagacuuccuccacgccaacugcauaguccaccgagaccucaaacccgaaaacauccuaguaaccagcggaggaaccgucaaacucgcagacuucggccucgcccgcaucuauucauaccaaauggcccucacccccguagucgucacccucugguaccgagcccccgaaguccuccuccagucaacauaugccaccccagucgacaugugguccgucggcugcaucuucgccgaaauguuccgccgcaaaccccuauucugcgguaacuccgaagcagaccaacuuggcaaaaucuucgaucuaaucggccuacccccagaagacgacuggccccgagacgucucccucccccgcggagcauuucccccacgcggcccaagacccguacaauccgucguccccgaaauggaagaguccggcgcacaacuccuccucgaaaugcuaacauucaacccccacaaacgaaucucugcauuccgugcacuccaacacuccuaccuacacaaagacgaaggaaaccccgaauaa

SEQ ID NO: 4124 - RNA, 912 nt, Artificial Sequence
  AAA35673 variant
auggccaccucccgcuacgaacccguagccgaaaucggagucggcgccuacggcaccgucuacaaagcccgagacccccacagcggccacuucguagcccucaaauccguccgaguccccaacggcggaggaggcggcggaggccuacccauuagcaccguccgcgaaguagcccuccuccgcagacucgaagcauucgaacacccaaacgucguccgccucauggacguaugcgccacaucccgcaccgaccgcgaaauaaaagucacccuagucuucgaacacguagaccaagaccuccgcaccuaccucgacaaagcacccccacccggacuccccgccgaaacaaucaaagaccucaugcgacaauuccuacgcggccuagacuuccuacacgccaacugcaucguccaccgcgaccucaaacccgaaaacauccucgucaccuccgggggcaccguaaaacucgccgauuucggccucgcccgaaucuacucuuaccaaauggcccuaacccccgucgucgucacccucugguaccgugcccccgagguccuccuacaguccaccuacgccacccccgucgacaugugguccgucggcugcaucuucgccgaaauguuccgccgaaaaccccuauucugcggcaacagcgaagccgaccaacuaggcaaaauuuucgaccucaucggccuacccccagaagacgacuggccccgagacguaucacucccccgcggcgccuucccaccccgaggaccccgccccguacaaucagucguaccagaaauggaagaauccggcgcccaacuccuccucgagaugcucacguucaacccccacaaacgaaucuccgccuuccgcgcccuccaacacucauacuuacacaaagacgaaggcaaccccgaauaa

SEQ ID NO: 4125 - RNA, 690 nt, Artificial Sequence
  AAB50213 variant
auggacgucugcgcaaccucccgaaccgaucgcgaaaucaaagucacccucgucuucgaacacgucgaccaagaccuccgcaccuaccucgauaaagcaccuccacccggccuccccgccgaaaccaucaaagaccucaugcgacaauuccuccgcggccucgacuuccuccacgccaacugcaucguccaccgcgaccucaaacccgaaaacauccucgucaccuccggcggcaccgucaaacucgccgacuucggccuagcccgcaucuacuccuaccaaauggcacucacccccgucgucgucacccucugguaccgcgcccccgaaguccuccuucaauccaccuacgccacacccgucgacaugugguccgucggcugcaucuucgccgaaauguuccgccgcaaaccccucuucugcggcaacuccgaagccgaccaacuaggcaaaaucuucgaccucaucggccucccacccgaagacgacuggccccgcgacgucucccucccacgcggagccuucccaccccgcggaccccgcccaguccaaucagucguccccgaaauggaagaauccggcgcccaacuccuccuagaaaugcucaccuucaacccccacaaacgcaucuccgccuuccgcgcccuccaacacuccuaccuccacaaagacgaaggcaaccccgaauaa

SEQ ID NO: 4126 - RNA, 336 nt, Artificial Sequence
  AAH15669 variant
auggccacgagcagguacgagcccguggccgagaucggggucggggccuauggcacggucuauaaagcgcgcgauccccauagcgggcacuuugucgcgcucaagagugugcgcgugcccaauggcgggggcgggggcgggggcuugcccauaagcacggucagggaaguggcccugcuaaggcgcuuggaagcguucgagcacccgaacguggucaggcucauggacgugugcgcgaccucgcgcacggacagggaaauaaaaaggugcuuugucgagagcuugagcucggucgagaccuugaaaccgaccucgugggcgaaaucgcucacguga

SEQ ID NO: 4127 - RNA, 429 nt, Artificial Sequence
  ACY78326 variant
auggaacccgccgccggcuccucaauggaacccucagccgacuggcucgccacagccgccgccagaggccgagucgaagaaguccgcgcccuccucgaagccggcgcacuccccaacgcccccaacuccuacggccgccgcccaauacaagucaugaugaugggcucagccagagucgccgaacuacuccuacuccacggcgccgaaccaaacugcgccgaccccgcaacacuaacccgccccguccacgacgccgcccgcgaaggcuuccucgacacccuagucguccuccaccgcgccggcgcccccugcgccaugcccggagccgucugccccuggacauggcuacgcucaugggccaucgccaugucccacggaaccugcgccagacuccgcggcgcacccgaagccguaaccaugcccgcauaa

SEQ ID NO: 4128 - RNA, 351 nt, Artificial Sequence
  EAW58598 variant
auggagccggcggcggggaguaguauggagccgagugcggauugguuggcgacggcggcggcgagggggaggguggaggaggugagggcguuguuggaggcgggggcguugccgaaugcgccgaauaguuaugggaggaggccgauacagguggggagggggagugcggcgggggcgggggauggggggagguuguggaggacgaaguuugcgggggaguuggagagcgggagugcgagcauauugaggaagaaggggaggcugccgggggaguuuagugaggggguguguaaucauaggccgccgccgggggaugcguugggggcgugggaggcgaaggaggaggaguag

SEQ ID NO: 4129 - RNA, 471 nt, Artificial Sequence
  AFN61598 variant
auggaaccggcagcgggcucgagcauggaaccgagcgcggacuggcuagcgacagcggccgcgagagggagaguggaagaggucagggccuugcuagaggccggggcacugccaaaugcaccgaacucguacgggcgaaggccaauacaagugaugaugauggggagcgcaagaguggccgagcuauugcuauugcacggagccgagccaaauugcgcggacccggcaacgcuaacgcgcccgguacaugacgcggccagggaaggguucuuggacacgcuagugguacugcacagggccggggccaggcuagaugucagggacgcgugggggcgauuaccaguggaccuggcagaggaauugggacauagagaugucgcaagauaucuaagggccgcggcagggggaacgagagggagcaaucacgcgcgaauagacgcggcagagggcccgagcgauauaccggacuag

SEQ ID NO: 4130 - RNA, 327 nt, Artificial Sequence
  CCQ43815 variant
auggaagugaugaugauggggagcgcgagaguggcagagcuauugcuauugcacggggcagagccaaauugcgcggacccggcaacgcuaacgagaccgguacaugacgcggcaagggaaggguucuuggacacgcuagugguauugcacagagcaggggccaggcuagauguaagggacgcgugggggcgauugccaguggacuuggccgaggaauugggacauagagauguagcgagauaucuaagggcagcggccgggggaacgagagggagcaaucacgcgcgaauagacgcggcagagggaccgagcgauauaccggacuag

SEQ ID NO: 4131 - RNA, 399 nt, Artificial Sequence
  AAA82236 variant
auggugcgcagguucuuggucacgcucaggaucaggcgcgcgugcgggccaccgcgcgugcgcguguucgugguccauaucccacgcuugaccggggaaugggccgcgcccggggccccagccgcggucgcgcucgugcucaugcucuugcgcucgcaaaggcucgggcaacagccccugcccaggcgcccgggccaugacgauggccagcgcccgagcgggggcgcggccgcggccccgcgcaggggcgcgcaauuacgcaggcccaggcacucgcacccgaccagggccagacgcugucccgggggcuugcccgggcacgcgggcggggccgcgcccggacgcggggccgcgggcagggccaggugcuuaggcccaagcgcgcgagggcccggguga

SEQ ID NO: 4132 - RNA, 2109 nt, Artificial Sequence
  CCDS12584.1 variant
auggaaucacccuccgcaccaccccaccguuggugcauaccauggcagcggcuacuccuuaccgccagccuacucaccuuuuggaaucccccuacaacggccaaacucaccauugaaucaacccccuucaacgucgcugaagguaaggagguacuacuucuaguccacaaccuuccacaacaccucuucgguuacuccugguacaaaggggaacgcgucgacggcaaccgucaaaucaucggcuaugucauuggaacccaacaggccaccccuggcccugcauauuccggccgcgaaaucauuuaccccaacgcuucccugcuaauccagaacauaauucaaaacgacaccggcuucuacacccuacaugucaucaaaagugaccucgucaacgaagaagccacuggccaauucagagucuaucccgaacuaccaaaacccucaaucuccagcaacaacagcaaacccguugaagacaaagacgccgucgcauucacaugcgagccggagacccaagacgccaccuaccuuugguggguaaacaaccaaucacucccaguaucuccccgccuccaacucuccaacggaaacagaacccucacccucuucaacgucacacgcaacgacaccgcauccuacaaaugcgaaacacaaaaccccguaucugcccgccgcucagacuccguaauccucaacgugcucuacggccccgaugcgccuacgaucucaccccucaacaccuccuaccgauccggcgaaaaccucaacuuaucaugccacgccgccucuaacccacccgcacaauacuccugguucguaaacggcaccuuccaacaauccacgcaagaacucuuuauccccaacauaaccguaaauaacucuggaucuuauaccugccaagcccacaacucggacaccggccuaaaccgcaccaccgucacaaccauaaccgucuacgcagaaccuccaaagcccuuuaucaccagcaacaacuccaacccggucgaagacgaagacgccgucgcauuaaccugcgaaccagaaauccaaaauaccaccuaccuuuggugggucaacaaccaaucuuuacccgucucaccccgucugcaacuuuccaacgacaaccgcacucuaacccuccuauccguaacacgcaacgacguaggcccauacgaaugcgggauccaaaaugaacucuccgucgaccacuccgaucccgucauccucaacguccucuacggccccgacgacccuaccaucucaccguccuacaccuacuaccguccgggcguaaaccuaucccucuccugccaugcagccucuaaucccccggcccaauacuccuggcucaucgacggcaacauacaacaacacacacaagaacuuuuuaucucaaacaucacagagaaaaacucaggccucuacacaugccaagccaacaacuccgccuccggccacucacguaccacagucaagaccaucacaguaucugcagaacucccaaaacccaguauauccuccaauaauuccaaaccagucgaagauaaagacgcagucgccuucacaugugaacccgaagcccaaaacaccacauaccucuggugggucaacgggcaaucucucccagucuccccgcgccuccaacucuccaacggcaaccggacccucacacuauuuaacgucacccgcaacgaugccagagccuacgucuguggcauacaaaacuccgucucagccaaccgauccgaccccgucaccuuagacguccucuauggcccagacacacccauaauauccccucccgacuccuccuaccuauccggcgccaaccucaaccucucaugccacuccgccucaaaccccagcccccaauacuccuggagaauaaacggaauaccccaacagcacacgcaaguccucuuuaucgcaaaaaucacuccaaacaacaacggaaccuaugcaugcuucgucagcaaucuagcuaccggccgaaacaacucgauagucaaauccauaacuguaagcgcauccggcaccagccccggacuauccgcuggagccaccgucggaaucaugauaggcguccucgucggcgucgcccuaaucuaa

SEQ ID NO: 4133 - RNA, 1035 nt, Artificial Sequence
  AAA51739 variant
augggcccacccucagccccacccugccgccuacacguccccuggaaagaaguccuccucacagccucacuccucaccuucuggaacccacccaccacagccaagcuaaccaucgaauccacccccuucaacguagccgaaggcaaggaaguccuacuacuugcccacaaccuaccccaaaaccgaaucggcuacucaugguacaaaggcgaaagaguagacggcaacucccucauagucggauacgucaucggcacccaacaagccacacccggccccgccuacucgggccgcgaaaccaucuaucccaacgccucccuccucauccaaaacguaacccaaaacgacaccggcuucuacacccuccaaguaaucaaaagcgaccucgucaacgaagaagccaccggccaauuccacgucuaccccgaacuccccaaaccauccauuuccucaaacaacucaaaccccguagaagacaaagacgccgucgccuucacaugcgaaccagaaguccaaaacaccaccuaccuauggugggucaacggccaaucccuacccgucucuccccgccuccaacuauccaacggcaacaugacccucacacuccuauccgucaaacgaaacgacgccggcuccuacgaaugugaaauccaaaaccccgccucagcuaaccggucggaccccgucacccucaacguccuauacggccccgacggccccaccauaucccccuccaaagccaacuaccgccccggcgaaaaucucaaccucuccugccacgcagcauccaacccacccgcccaauacuccugguucaucaacggcacuuuccaacaaucaacccaagaacucuucauacccaacaucaccguaaacaacuccggauccuacaugugccaagcccacaacucagccaccggucucaaccguacaaccgucaccaugaucaccgucuccggcucagcacccguacucuccgcagucgccaccgucggcaucaccaucggcguccucgcccgcgucgcccucaucuaa

SEQ ID NO: 4134 - RNA, 1173 nt, Artificial Sequence
  AAB04533 variant
augggugccacaacaauggaccaaaaaucccucugggcaggcguaguaguccuccuccugcuccagggcggcuccgccuacaaacucgucugcuacuucaccaacuggucccaagaccgacaagaacccgguaaguucacccccgaaaacaucgaccccuuucuaugcucgcaccucauauacagcuucgccuccaucgaaaacaacaaagucauaaucaaagacaaauccgaagucaugcucuaccaaaccaucaacucacucaaaacuaaaaaccccaaacucaaaauacuccucuccauaggcggcuaccuauucggcucaaaaggauuccaccccaugguagacuccuccacaucacgccucgaguucaucaacuccaucauccucuuccuccgcaaucauaauuucgacggccucgacguaucauggaucuaccccgaccaaaaagaaaacacacacuucaccguccucauccacgaacuugccgaagccuuccaaaaagacuucaccaaauccaccaaagaacgucuacuccucaccgccggcgucuccgccggccgccaaaugauagacaacucauaccaagucgaaaaacuagccaaagaccucgacuucauaaaccuccucuccuucgacuuccacggcucaugggaaaaaccccucaucacaggccacaacagcccccuauccaaaggauggcaagaccgcggcccauccuccuacuacaacgucgaguacgccguaggcuacuggauccacaaaggcaugccaagcgaaaaaguagucaugggcaucccaaccuacggccacagcuucacacucgccagcgcagaaaccacagucggcgcaccagcaagcggacccggagccgccggaccaaucacagaauccuccggcuuccuugccuacuacgaaaucugccaauuccucaaaggcgccaaaaucacccggcuucaagaccaacaagucccauacgcagucaaaggaaaccaaugggucggcuacgacgacgucaaauccauggaaacaaaaguacaauuucuaaagaaccucaaccuuggcggagccaugaucuggucaauagacauggacgacuucacaggaaaaagcugcaaccaaggccccuacccccucguccaagcugucaaacgaucgcucggcucacucuga

SEQ ID NO: 4135 - RNA, 2832 nt, Artificial Sequence
  AAD40367 variant
augacucagcgcucgaucgcgggucccauaugcaaccucaaauucguaacccuccucguugcucucucauccgagcuacccuucuuaggugccggcguacaacuccaagacaacggcuacaacggccuucugaucgccauuaacccccaagucccagagaaccaaaaccucauauccaacaucaaagagaugauuaccgaagccuccuucuacuuauuuaacgcuacaaaacgacgcguuuucuuccgaaauauaaaaauccuuauaccggccaccuggaaagccaacaacaacuccaaaaucaaacaagagucauacgaaaaggcuaacguuaucgucaccgacugguacggagcccacggagaugacccauacacccuccaguaccgcgguugcggaaaagaaggcaaauacauccacuucacacccaacuuccuucuaaacgacaaccucaccgcuggcuacgggucccgcggccgcguauucguacaugaaugggcccaccuaagauggggcguguucgacgaauacaauaacgacaaacccuuuuacauaaacggccaaaaccagauaaaagucacgcgauguucuucagauauuacuggcaucuucgucugcgaaaaaggccccugcccacaggaaaacugcaucauuucuaaacucuucaaagaagggugcaccuucauuuacaauuccacacaaaacgccaccgccaguauaauguucaugcaaucgcucuccucaguugucgaguucuguaacgcuuccacccacaaucaggaagcacccaaccuccagaaccaaaugugcagccuccgcuccgcgugggacgucaucacugacagcgccgacuuccaccauucuuucccaaugaauggcaccgaacuucccccaccuccuacauucucccugguccaagccggcgacaaaguugucugucucguccucgacgucuccucgaagauggccgaggcagaccgccuccuccaacuccaacaagcugccgaguucuaccuaaugcagauagucgaaauccacaccuuuguaggcaucgccagcuucgacagcaaaggagaaaucagggcccagcuucaccaaaucaacagcaacgacgaccgaaaacuccuaguuagcuaucuccccaccacaguaucggccaagacagacaucuccaucuguuccggccucaagaaaggauucgagguagucgaaaaacucaacggcaaggccuacggcucaguaaugauacuugucaccuccggggaugacaaacuccuaggcaacugucuacccaccguucucucauccggaucaaccauccauucuaucgcccucggcucaucagccgcacccaaccucgaagaacuuucccgccugacaggcggacuaaaauucuuuguucccgacaucucaaacucuaacuccaugaucgacgcauucucccgcauauccagcggaacaggcgacauauuccaacaacacauucaacucgaaagcaccggugaaaacgucaaaccucaccaccaacucaaaaacacggucacaguagauaauacuguaggaaacgacaccauguuccugguaacauggcaggcaucaggaccucccgagaucauucuauucgaccccgacggacgcaaauacuauacaaacaacuuuaucacaaacuuaacauuccggaccgccucacucuggauuccuggcacugccaaaccuggccacuggacauacacccuaaacaauacacaccacucccuccaagcacuaaaagucacggucacaucacgcgccagcaauucagcaguaccucccgccaccgucgaagcauuugucgaacgcgacucucuccauuucccccacccaguaaugaucuacgcuaacgucaaacaaggcuucuacccaauccuaaacgccaccgucacugcaacuguagaaccagagacaggcgacccuguaacccuccgucuccuagaugacggcgccggcgcagacguuauaaagaacgacggaaucuacagcagauacuucuucuccuucgccgccaacggccguuauucccuuaaaguccacguaaaccacuccccuuccauauccaccccagcccacucaauccccggcagucacgccauguacguaccaggcuacaccgccaacggaaacauccaaaugaaugccccucgcaaauccgucggacgcaacgaagaggagcgcaaaugggguuucucucgaguaagcuccggcgguucuuucucaguacucggcguccccgcaggcccucacccagacguuuucccucccugcaaaauuaucgaccucgaggccguaaaagucgaagaagaacucacccucuccuggaccgcccccggagaagauuucgaccaaggacaagccacgucauacgaaauccguauguccaaaucacuccagaacauccaggacgacuucaacaacgccauucuagucaacaccucuaaacgcaacccccaacaagccggcauacgggagauauucacuuucucaccacaaaucuccacgaacggccccgaacaccaacccaauggugaaacccacgaaucacaccgcauuuacguagcaauucgagcuauggaccgaaacucacuccaaucagccguuuccaacauugcccaagccccucuauucaucccacccaacuccgaccccgugcccgcccgcgacuaccuaauucugaaaggcguauugacagccauggggcucaucggcauaaucugccucaucaucgucgucacccaucacacacuaucgcgcaaaaagcgggccgacaagaaagaaaacgguacaaagcuccucuga

SEQ ID NO: 4136 - RNA, 708 nt, Artificial Sequence
  AAF82135 variant
auggaggaagagacccacaccgacgccaagauaagggccgagaacgggaccgggagcucgcccaggggcccgggcugcagccugcgccauuucgcgugcgagcaaaaccucuugagcagacccgauggcucggccucguuccugcaaggggacacaagcgugcucgcgggcguguacgggccagcagaagugaaagugagcaaggaaauauucaacaaagcgaccuuagaagugaucuugcgcccgaaaauaggccuacccggggucgccgagaaaagcagggaaaggcucauacgcaauaccugcgaagcggucgugcucgggaccuugcacccgcgcacgagcauaaccgugguccugcaaguagucucggacgcaggcucgcuccuagccugcugccugaacgcggccugcauggcgcucguagacgcgggcguacccaugcgcgcacucuucugcggagucgcgugcgcacucgauagcgauggcacgcucgugcucgaccccacgagcaagcaagaaaaagaggccagggccgugcucacguucgcgcucgacagcgucgaaaggaaauugcucaugagcucaacaaagggccuauacucggacacggaauugcaacagugcuuggccgcggcccaggcagcgagccagcacguauucagauucuaucgcgaaagucuacaaaggcgcuacagcaaaaguuag

SEQ ID NO: 4137 - RNA, 1752 nt, Artificial Sequence
  CCDS6312.1 variant
auggaagucgcagcaaacugcucacugcgagugaaacggccacuccuagacccccgcuucgaaggcuacaaacuuagccucgaaccccuacccuguuaccaauuagaacuagacgcagccgucgccgaggucaaacuccgcgacgaccaauacacccuagaacacaugcacgccuucgguauguacaauuaccuccacugcgacucaugguaccaagacagcguauauuauaucgacacccucggaagaauaaugaaccucaccguaaugcuagacaccgcccucggcaaaccacgagagguauuccgccuaccaaccgaccugaccgccugcgacaaccgacuaugcgccuccauccacuuuuccuccucaaccuggguaacccucuccgacggcacaggccgacucuacgucaucggcaccggcgaacgugggaacuccgccuccgaaaaaugggaaaucauguucaacgaagaacucggcgaccccuucaucauaauacacucaauuucccuccucaacgccgaggaacacuccauagccacacuucuccuccgaaucgaaaaagaggaacucgacaugaaaggcucaggauucuacguaucgcuggaauggguaaccaucucaaagaaaaaccaagacaacaagaaauacgaaaucaucaaacgcgacauccuacggggcaaaagcgucccacauuacgcugccauagaaccagacggcaacggacucaugaucgucuccuacaaaucccugaccuucguacaagcuggccaagaccucgaggaaaacauggacgaagacauaucagagaaaauaaaagaaccccucuacuacuggcaacaaacagaagacgaccuaaccgucaccauccgacucccugaagacagcaccaaagaggacauccaaauccaauuucuacccgaccauaucaacaucguccugaaagaccaccaauuccuagaagguaaacuguacuccuccaucgaccacgaauccagcaccuggaucaucaaagaaucaaacucccucgaaaucucccucaucaagaaaaacgaaggccuaaccuggccugagcuaguaauaggcgacaaacaaggcgaacucauccgcgacuccgcacagugcgccgccaucgcagaacgccucaugcaccuaacaagcgaagaacucaaccccaacccagacaaagaaaaaccacccugcaacgcccaagaacuagaagaaugcgacaucuucuucgaagagagcucuagccucugccgauucgacggcaacacacucaaaaccacacacguagucaaccuaggcucaaaccaauaccuauucucagucaucguagaccccaaagaaaugcccugcuucugccuccgccacgacgucgacgccuugcucuggcaaccccacuccucgaaacaagacgacaugugggagcacaucgcaacauucaacgcccucggcuacguucaagccuccaagcgagacaagaaauuuuucgcgugcgccccaaauuacuccuacgcugcccucugcgaaugccuccgccgcgucuucauuuaccggcaacccgcccccaugagcacaguccuauacaaccgcaaagagggccgccaagucggccaagucgcaaaacaacaaguagccucacucgagacuaacgaccccauucucggcuuccaagcaaccaacgagcgacucuucguccucaccacgaaaaaccucuuccucaucaaagucaauacagagaacuaa

SEQ ID NO: 4138 - RNA, 1563 nt, Artificial Sequence
  CCDS41288.1 variant
auguccucaccccuagccucccucuccaaaacacgcaaaguaccccuuccaucagagcccaugaacccaggccgacgcggcauacgcaucuacggcgacgaagacgagguagacauguuauccgacggcugcggcagcgaggagaaaauaucaguaccauccugcuacggaggaaucggcgccccaguaucacgacaaguccccgccucacacgacuccgaacucauggcauucaugacuagaaaacuuugggaccucgaacaacaagucaaagcacagaccgacgaaauccuaucaaaagaccagaaaauagcagcccuggaagaucuuguccaaacacucagaccccaccccgcugaagccacucuccaacgccaagaagaacucgaaaccaugugcguacaacuacagcgucaaguccgcgaaauggaacgcuuccuauccgacuacggccuccaaugggucggagaacccauggaccaagaagacagcgaaucaaaaaccgucagcgaacacggcgagcgcgacuggaugaccgcuaagaaauucuggaaacccggagacucccucgccccucccgaagucgacuucgacagacuccucgccucacuccaagaccucuccgaauuagucgucgaaggcgauacucaagucacccccguucccggcggugcacgacugagaacccucgaaccaaucccccucaaacucuaccgcaacggaauaaugauguucgacggcccauuccaacccuucuacgaccccuccacccaaagaugccuacgcgacauccuagacggauucuuccccucagaacuucaaagacuauaccccaacggaguaccauucaaagucucugaccuccguaaucaagucuaccucgaagacggccucgacccauuccccggcgaaggacgagucgucggacgacaacucaugcacaaagcacucgaccgcgucgaagaacaccccggcucucgaaugacagccgaaaaauuccucaaccgccuccccaaauucguaauacgucaaggagaaguaauagacauucgaggccccauacgcgacacccuccaaaacugcugcccacuucccgcccgcauacaagaaauagucguagaaacaccaacacucgcagcagaaagagaacgcucacaagaaucccccaacacccccgcaccaccccucucaaugcuucgcaucaaauccgaaaacggcgaacaagccuuccuacucaugaugcaaccugacaacacaauaggcgacguccgcgcgcuccucgcccaagccaggguuauggacgccucugccuucgaaauauucucaaccuucccgcccacccucuaccaagacgacacacucacacuacaggcagccggacucguacccaaagccgcccuacuccuccgagcacgacgagcacccaaaagcucacucaaauucucccccggccccugccccggccccggacccgggcccucacccggucccggccccggucccucacccggcccaggccccggccccucacccugccccggaccaucaccaucuccccaauaa

SEQ ID NO: 4139 - RNA, 429 nt, Artificial Sequence
  AAA88022 variant
auggcgaccaaaaucgacaaagaggccugccgcgcggccuacaaccuggucagagacgacggcucggccguaaucugggucacauucaaauacgacggcucgaccauagucccaggcgaacaaggggccgaauaccagcacuucauccagcaaugcaccgacgacguacgccuguucgcauucguacgcuucaccacaggcgacgccaugagcaaacgcucaaaauucgcccugaucacauggauaggcgaaaacguaagcggacuccagcgcgcaaaaacaggcacagacaaaacccuggucaaagaaguaguccaaaacuucgccaaagaauucgucauaagcgaccgcaaagaacuggaagaagacuucaucaaaagcgaacucaaaaaagcaggcggggccaacuacgacgcccagaccgaauaa

SEQ ID NO: 4140 - RNA, 495 nt, Artificial Sequence
  CCQ43891 variant
auggccacgcgcgaccccugggucuggauggcgagcccggacuuucaagcacgaaagggaaagcgcgugcaccaggaaacgcucgcacccggagaaacaaaagauaaaauggaauugcuagggcuaaggggaccgcucgaucucuugggcccgggagcgcuccuggccacgcucgggaaaauggccccgggagagcacaaggcccagcgcgcgccaaaggaaucgccagauaaaacagccaggugggcgcaaagggacccgcaagggcccagagucucacucgaguaccuggaaaggcgagcgacaaugggccaucaagcgagccuggaccaucaagggcccagggccucgcaaggggccuggggauugggcgagcgaacggucuggaccgugccacaggacaggcgcgggagcuuggcaacggaagcgcgaauggaacugcaagggcccggggucccgcaagcgagcagagcaucgagagagacccagugguaa

SEQ ID NO: 4141 - RNA, 1623 nt, Artificial Sequence
  AAO18361 variant
augggaccaggggagagagcagggggagggggagacgcgggaaagggaaaugcggcaggaggagggggaggagggaggagcgcgacgacagcagggaguagagcgguaagugcacuaugccuguugcugucaguggggagugcagcagcaugcuugcucuugggagugcaagcggcagcgcuacagggaagaguagcagcauuggaagaggagagggagcugcugagaagggcaggaccgccaggggcguuggacgcgugggcagaaccgcaucuagaaagacuuuugagggagaagcuggacggguuggcgaaaauaaggacggcgagggaggcgccgagugagugcguaugcccaccggggccgccagggaggagaggaaaaccagggagaagaggagacccggggccgccgggacaaaguggaagggacggguauccagggcccuuaggcuuagacgggaaaccaggauugccggggccaaagggagaaaaaggagcaccgggagauuucggcccgagaggagaccaggggcaggauggagcggccgguccgccaggaccgccagggccaccgggggcgagagggccaccgggggauaccggaaaagauggaccgagaggggcacaaggaccagcaggaccaaaaggggaaccaggacaggauggagagauggggccgaagggaccgcccgggcccaagggggagccgggggugccgggaaagaagggggacgacggaacaccgagccaaccgggcccaccggggccgaagggggagccagggagcauggggccaagaggagaaaauggaguggacggagcgccgggaccgaagggggaaccgggacauaggggaacggauggagcggcaggaccaaggggagcgccgggacugaagggggaacagggggacacgguaguaauagacuacgacggaaggauacuggacgcgcuaaaaggaccgccaggaccacaggguccaccaggaccgccgggaauaccgggggcaaagggugagcuggggcuaccgggggcaccgggaaucgauggggagaaaggaccgaagggacaaaaaggggacccaggagagccggggccggcggggcugaagggggaagcgggagagaugggacugagugggcugccuggggcugaugggcugaaaggagaaaaaggagagagugcgagugacagucuacaagagaguuuagcacaacuaauaguggagccggggccaccaggaccgccagggccuccaggaccaauggggcuacaggggauacaggggccaaaggggcuagauggggcaaagggagagaaaggcgcaagcggagagcgagggccuaguggacugccggggccaguaggaccacccggacuaauaggauuaccaggaacaaagggagaaaaggggagaccaggagagccggggcuggacggauucccaggaccuagaggggaaaaaggggauagaucagagagaggugaaaagggggaaagaggggugccaggaagaaaaggagugaaggggcagaagggggagccagggccgccggggcuggaucagccgugcccggucggaccggauggacugccgguaccaggaugcuggcacaaauga

SEQ ID NO: 4142 - RNA, 492 nt, Artificial Sequence
  CAG25548 variant
augcucgcccgcgcccuccuccucugcgccguccucgcacuaucccacaccgccaaccccugcugcucacaccccugccaaaaccgcggcgucugcauguccgucggcuucgaccaauacaaaugcgacugcacccgcaccggcuucuacggcgaaaacugcuccacccccgaauuccucacccgcaucaaacucuuccucaaacccacccccaacaccguccacuacauccuaacacacuucaaaggcuucuggaacgucgucaacaacauccccuuccuccgcaacgccaucauguccuacguccucaccucccgcucccaccuaaucgacuccccccccaccuacaacgccgacuacggcuacaaauccugggaagccuucuccaaccucuccuacuacacccgcgcccucccccccguccccgacgacugccccaccccccucggcgucaaagcccuccacgccuccgucuuccaagaccgcucauaa

SEQ ID NO: 4143 - RNA, 1632 nt, Artificial Sequence
  AAC50809 variant
augggcaccucccucuccccaaacgaccccuggccacucaacccacucuccauccagcaaacaacccuccuacugcuccuauccguccucgccacuguccaugucggacaacgauuacuccgccaaagacgacgccaacuucgcucagcacccccaggucccuucgccuggccccucaucggcaacgccgccgccgucggacaagccgcccaucuauccuucgcccgccuagcacgacgauacggcgacgucuuccaaauucgucuagguuccugcccaaucguuguccuuaacggagaaagggccauacaccaagcccuaguccaacaagguagcgccuucgccgaccguccagcauucgccucauuccgcgucgucuccggcgggagauccauggccuucggccacuacucagaacacuggaagguccaacggcgcgccgcacacuccaugaugcgcaacuucuucacccgccaaccccgaucccgccaaguccucgaaggacacguccuauccgaagcccgcgagcuagucgcccuacuuguccgcggcuccgccgacggcgcauuccuagacccccgcccacuuaccguaguagccguagccaaugucaugagcgcagucugcuucggcugccgauacucacacgacgaccccgaauuucgcgaacuccucucccauaacgaagaauuuggccgcacagucggcgcuggcucccuagucgacguaaugccauggcuacaauacuuccccaacccaguccgcaccgucuuccgagaguucgaacaacucaaccgcaacuucucaaacuucauccuagacaaauuccuccgccacugcgaaucacuccgccccggcgcagccccucgugacaugauggacgccuucauccucuccgccgaaaagaaagcagccggagacucacacggcggcggagccagacucgaccucgaaaacguucccgccaccaucaccgacaucuucggcgcuucccaagacacacucuccaccgcccuucaauggcuauuacuacuguucacgcgcuacccugauguccaaacccgcguacaagcugaacucgaccaaguugucggccgcgaccgccuccccugcaugggcgaccaaccaaaccucccuuauguccucgccuuccuuuaugaagccaugcgauucucauccuucguucccgucacuaucccccacgcaaccaccgccaacacuucaguacucggauaccacauacccaaagacaccguagucuuugucaaccaaugguccgucaaccaugacccucucaaauggcccaacccugaaaacuucgaccccgcccgauuccucgacaaagauggccucaucaacaaagaccuaacuucucgugucaugauuuucucagugggcaaacgccgcugcauaggagaggaacucucaaaaaugcaacucuuccucuucaucucuauacuugcccaccaaugcgacuuccgagccaaccccaacgaacccgcuaaaaugaacuuuucuuacggccuuacuauaaaacccaaauccuucaaagucaacgucacccuucgcgaaagcauggaacuacucgacucugccguccaaaaccuacaagccaaagaaaccugccaauaa

SEQ ID NO: 4144 - RNA, 333 nt, Artificial Sequence
  NM_001129828 variant
auguggaugggacucauccaacuagucgaaggcgucaaaagaaaagaccaaggauuccuagaaaaagaauucuaccacaaaaccaacaucaaaaugcgcugcgaauuccucgccugcuggcccgcauucacaguccuaggcgaagccuggcgcgaccaagucgacuggagcagacuccuccgcgacgccggacucgucaaaaugagccgaaaaccccgcgccagcuccccccuaagcaacaaccacccccccacccccaaacgcuucccacgccaacccggccgcgaaaaaggccccauaaaagaaguccccggcaccaaaggcagccccuaa

SEQ ID NO: 4145 - RNA, 384 nt, Artificial Sequence
  NM_001129826 variant
auguggaugggccucauccaacucgucgaaggcgucaaacgcaaagaccaaggcuuccucgaaaaagaauucuaccacaaaacaaacaucaaaaugcgcugcgaauuccuagccugcuggcccgccuucaccguccuaggcgaagccuggcgcgaccaagucgacuggucccgccuccuccgcgacgccggccucgucaaaaugucccgcaaaccccgcgccuccuccccccucuccaacaaccacccccccacccccaaacgccgcggcucaggccgccacccccucaaccccggccccgaagcccucuccaaauucccccgccaacccggccgcgaaaaaggccccaucaaagaaguccccggcaccaaaggcucccccuaa

SEQ ID NO: 4146 - RNA, 570 nt, Artificial Sequence
  AAI40914 variant
augaccgauaaaacggaaaaggucgcggucgaucccgagaccguguucaagcgcccgcgcgagugcgauagcccgagcuaucaaaagcgccagcgcauggcccugcucgcgcgcaagcaaggggccggggacucgcucauagccgggagcgcaaugucgaaagcgaaaaagcucaugaccgggcacgcgaucccgcccucgcaauuggacucgcaaauagacgauuucacgggcuuuagcaaggacaggaugaugcaaaagcccgggagcaaugccccggucgggggcaaugucacgagcucguucucgggcgaugacuuggaaugucgagaaaccgcgagcucgcccaagagccagcgcgagaucaaugccgauaucaagcgcaagcucgugaaagagcucagaugcgugggccagaaauaugaaaagaucuuugaaaugcucgagggcgugcaagggccaacggccgugcgcaagcgcuuuuucgagagcauaauaaaggaagcggccagaugcaugcgcagggacuuugucaagcacuugaaaaagaaauugaaaaggaugauauga

SEQ ID NO: 4147 - RNA, 795 nt, Artificial Sequence
  AAH20662 variant
augcuccgccuccuccgccucgcccucgccuucuacggucgcacagccgaccccgccgaacgccaaggcccucaacaacaaggccucccacaaggagacacccaacucaccaccguccaaggcgucgucaccuccuucugcggcgacuacggcaugaucgacgaaucaaucuacuucuccuccgacgucgucaccggaaacgucccccucaaagucggucaaaaagucaacguagucgucgaagaagacaaaccccacuacggccuccgcgccaucaaagucgacgucguaccccgacaccuauacggcgccggccccuccgacuccggcaccagaguccucaucggcugcguaaccuccaucaacgaagacaacauauacaucuccaacuccaucuacuucucaaucgccaucguuuccgaagacuucguccccuacaagggcgaccuacucgaagucgaauacuccaccgaacccggcaucuccaacaucaaagcaaccuccgucaaacccauacgcugcauccacaccgaagaggucugcauaaccucaguacacggccgcaacggcgucaucgacuacaccaucuucuucacacucgacuccgucaaacuccccgacggcuacgucccccaaguagacgacaucgucaacgucguaauggucgaauccauccaguucugcuucauauggcgcgcaaucuccauaaccccaguccacaaauccuccuccggauuccaagacgacggcggccucggacgccccaaacgcgaaagacgcucccaaucaauauaa

SEQ ID NO: 4148 - RNA, 2844 nt, Artificial Sequence
  CCDS735.1 variant
augagccuacccucucgucagacagcgaucaucgucaacccaccaccacccgaauacauuaauaccaagaaaaacggccgacuaacgaaccaacuccaauacuuacagaaagucgugcuaaaggaccuguggaaacacucauucuccuggcccuuccaacgaccagucgacgccgucaaacuucaacucccagauuacuauaccaucaucaaaaacccaauggaccuaaacacaaucaagaaacgcuuagaaaacaaauacuacgccaaggccuccgaaugcauagaagacuucaacacgauguucuccaacugcuaccuauacaacaaaccuggagacgacaucguacuuauggcccaagcgcuugagaaacucuucaugcaaaagcucucacagaugccccaggaagaacaagucgucggcgucaaagaacggauaaagaaaggcacccagcagaacaucgcagucucgagcgccaaagaaaaaucaagcccuagcgcgaccgaaaaagucuucaaacaacaagaaauccccucagucuuccccaaaacaaguauaucgccgcucaacgucguacaaggagcguccguaaacuccucaagccaaacagcugcccaggucaccaaaggaguaaaacgcaaagcugacaccaccacacccgccacuucagcaguaaaggcuuccuccgaguucagccccaccuucacugaaaaguccguggcccuaccacccaucaaggagaacaugcccaaaaacguccuacccgacucccagcaacaauauaacguaguuaagaccgugaaagucaccgaacaacuccgacacugcuccgagauccucaaggagaugcucgcaaagaaacacuuuucauacgcauggcccuucuacaaccccgucgacguuaacgcacucggacuccacaacuacuacgacguaguuaaaaacccgauggaccucggcacgauaaaggagaaaauggacaaccaagaauacaaagaugcauacaaauuugcagcagacguacgccugauguucaugaacugcuacaaauacaacccuccagaccaugaaguaguaacaauggcacgcaugcuacaagacgucuucgaaacucacuucuccaaaaucccgaucgaaccaguagagagcaugccacuaugcuacaucaagacagauaucacagaaacaacgggccgagaaaacacaaaugaggcuuccagcgaaggcaacuccuccgacgacuccgaagaugaacgaguaaaacgcuuagcaaagcuacaagagcaacuaaaagcaguccaucagcagcuccagguccucucacagguccccuuucgaaagcuaaacaaaaagaaagagaaaagcaagaaagaaaagaagaaagaaaaggucaacaacucgaacgaaaacccccgcaaaaugugcgaacaaaugcgacucaaagaaaagagcaagcguaaccaacccaagaaacgcaaacaacaauucauaggccuuaaauccgaggacgaagacaaugccaaaccuaugaauuacgacgaaaaacgacagcuaagucugaacaucaauaaacugcccggagacaaacucgggcgcguaguacacauaauccaaucccgagaacccucgcuaagcaacuccaaccccgacgagaucgaaauugacuucgaaacccucaaagccagcacacuacgagaacucgagaaauacgucuccgccugcuugcgaaaacgcccccucaaacccccagcuaaaaagaucaugaugagcaaagaggaacugcauucacagaagaaacaagaacuggaaaaacgccuccucgacgugaauaaccaacucaacagccgcaaacgccaaaccaaauccgauaaaacccagccaaguaaagcaguagaaaacgugucacggcuauccgaguccucaagcucaagcuccuccucauccgaaucagaaagcuccuccuccgaccuauccucgagugauucauccgacagcgaaucagaaauguuccccaaauucacggaggucaaacccaacgacagccccucaaaggaaaacguuaaaaagaugaagaacgaaugcauaccacccgaaggccgcacgggcgucacccaaaucggcuacugcguacaagacacgaccucagccaacaccacgcucguccaccaaacaacccccucccacgugaugcccccaaaccaccaccaacuggcauucaacuaucaagaacucgaacaucuacaaacugucaaaaacaucucuccccuccaaauccugccaccguccggggacuccgaacaacucucaaacggcauaaccguaaugcaccccucaggagacuccgacaccaccauguuggagagcgaaugccaagccccaguacaaaaagacauuaaaaucaaaaaugccgacucauggaagucccucggaaaacccgucaaacccuccggggucaugaaauccucagacgaacucuucaaccaauuucgcaaggcagccaucgagaaagaaguaaaagccagaacacaagaacucauacguaaacaccucgaacaaaacaccaaagaacugaaagccucccaagaaaaccaacgcgaccucgggaacgggcuaaccguagaaucauucucgaacaagauacaaaacaaauguucgggagaagaacaaaaagaacaccaacaaucuuccgaagcacaggacaaaagcaaacucuggcuacucaaagaccgagaccuagccagacaaaaagagcaagaacgccgacgcagagaggccauggugggaacuaucgacaugacgcuccaguccgacaucaugacaauguucgaaaacaacuucgacuaa

SEQ ID NO: 4149 - RNA, 543 nt, Artificial Sequence
  CCDS35455.1 variant
augcaagcggaagggcgaggaacagggggcucaaccggggacgcagacgggcccgggggcccaggcauacccgacggcccgggcgggaacgcgggcggacccggagaagcgggcgcgaccgggggcaggggcccgcgcggagccggggccgcgcgcgcgagcggacccaggggcggagccccgcgcgggccccauggcggagccgcgagcgcgcaagaugggaggugcccgugcggcgccaggcgaccggacucgcgcuugcucgagcuccauaucacaaugccguucucgagcccgauggaggccgagcucgugcgcaggaucuugagcagagacgcggccccgcucccgcgcccgggcgcgguccugaaagauuucacggucucaggcaaccuccuguucauacgacugacagcggccgaucacaggcaauugcaauugagcauaagcucgugccugcaacagcuaucacuccugauguggaucacgcaauguuucuugcccguguuccuggcccaggccccgagcgggcaaaggcgcuag

SEQ ID NO: 4150 - RNA, 633 nt, Artificial Sequence
  CAA10196 variant
augcaagcggaagggcaagggacagggggaucgacaggggacgcggacgggccagggggaccgggcauaccugauggaccaggagggaacgcgggagggccaggggaagcgggcgcgacagggggaaggggcccgagaggggcaggggcagcaagagcaagcgggccaagaggaggagccccgcgagggccacauggaggagcagcgagcgcgcaagauggaaggugcccgugcggggcaaggagaccggacagucgauugcuacagcuacauauaacgaugccguucucgaguccaauggaggccgagcuggugcgaaggauauuaagcagggacgcggcaccgcuaccacgcccgggagcgguauuaaaagauuucacgguaucgggaaaucuauuauucaugagcgugagagaucaagauagagagggagcgggaaggaugagaguagugggauggggauugggaucggcaucgcccgaaggacaaaaagcgcgagaucuaaggacaccgaaacauaaagugagcgagcaaaggccagggacaccgggaccgcccccaccagagggagcgcaaggggacgggugcaggggaguggccuuuaacguaauguuuagcgcgccacauauauag

SEQ ID NO: 4151 - RNA, 1992 nt, Artificial Sequence
  CCDS13459.1 variant
auggccgcuaccgaaauauccguccuaucagaacaauucacaaagauaaaagaacucgaacucaugccugaaaaaggacucaaagaagaagaaaaagacggcguaugcagagaaaaagaccaccggagccccagcgaauuagaggccgaacgcacaagcggagcauuccaagacuccgugcuggaagaagaaguagaacucgugcuagcacccucagaagaaagcgaaaaguacauacucacccuccaaacaguccauuucacaucagaagccguugaacuccaagacaugucccuacuaagcauccaacagcaagaagguguacaagucgugguucagcaacccggacccggacugcucuggcuagaggaaggucccaggcaaucgcugcaacaaugcguagccauaagcauacagcaagaacuauacucaccccaggagauggaaguccuacaguuccacgcacucgaagaaaacguaauggucgccuccgaggacucaaagcucgccgucucacucgcggagaccaccggccugaucaaacucgaggaagaacaagagaaaaaccaacuccucgccgaacgcaccaaggaacaacuauucuucguagaaaccauguccggcgaugaacggagcgacgaaaucguacucaccgucucaaacuccaauguagaagaacaagaggaccaaccgacagccggccaagccgacgccgaaaaggcuaaaagcaccaaaaaccaaagaaaaacaaaaggcgccaaaggcaccuuccacugcgacgucugcauguucaccuccucgaggaugagcucauucaacaggcacaugaaaacucacaccucagagaaaccgcaccugugccaucucugccuaaaaaccuuccgcaccguaacccuacucaggaaccacgucaauacccacacaggaacccgacccuacaaaugcaacgacugcaacauggccuucgucacaucuggcgaacucguacggcaccgccgauacaagcacacccacgaaaaaccguucaaaugcucaaugugcaaauacgccagcguugaagccuccaaacuuaaacgccacguacgcagccacacgggcgaaagaccguuucaaugcugccaaugcucauacgcaucacgagacaccuacaaacuaaaaagacacaugcgaacacacuccggagaaaaacccuacgaaugccacauaugccacacacgcuucacccaguccgggaccaugaaaauccacauccuccaaaaacacggagaaaacguacccaaauaucaaugcccccacugcgcaaccauaaucgcccgcaaaucugaccugcgaguccacaugcgcaaccugcacgccuacagcgcugccgaacuaaaaugccgauacugcagcgcaguauuccacgaacgcuacgcacuaauccaacaccaaaagacgcacaaaaacgaaaaacgcuucaaaugcaaacacugcuccuacgccugcaaacaagagagacacaugaccgcccacaucagaacccacaccggagagaaacccuucacaugccucucauguaacaaaugcuuccgccaaaaacaacuccucaacgcacacuuucgaaaauaccaugacgcgaacuucauuccaacagucuacaaaugcagcaagugcggcaaaggcuucagcagauggaucaaccuacaccgccacuccgaaaaaugcggcuccggagaggccaaauccgccgccuccggcaaaggaaggcgcacucgcaaacgcaaacaaacaauccuaaaagaagcaaccaaaggccaaaaagaggcagccaaaggcuggaaagaagccgccaacggagacgaggccgccgcggaagaggcaagcacaacaaaaggagaacaauuccccggcgagauguucccaguagcaugccgcgagacaacagcccgcgucaaagaagaagucgacgaaggaguaacaugcgaaaugcuacucaacaccauggacaaguaa

SEQ ID NO: 4152 - RNA, 2148 nt, Artificial Sequence
  CCDS11368.1 variant
augucacaaguuauguccucccccuugcucgccgguggacacgccguaucccucgcccccugcgacgaaccgcgccgcacccuccaccccgcccccucccccucucuuccuccccaaugcuccuacuacaccaccgaaggcuggggcgcacaagcauuaauggccccuguacccugcaugggacccccaggccgacuccaacaagcaccccaagucgaagccaaggcuaccugcuuccucccaucgcccggagaaaaggccuuaggcaccccugaagauuuagacuccuacauagacuuuucucuugaaucucucaaccaaaugauacucgaacucgaccccacauuccaacuacucccacccggcaccggaggaucccaggccgaauuagcucaaucaacaauguccaugcgaaagaaagaagaauccgaagcccuagacaucaaauauaucgaggucaccagcgcacgcucucgcugccacgacggaccccaacauuguuccucucccagcguaacacccccuuucggaucacuucgcuccggugguuuacuucucucacgugacgucccccgugaaacccgaucuuccucggaaucacucaucuucucaggcaaccaaggccgcggccaccaacgcccccucccacccagcgaaggacucucaccccgcccucccaacucccccuccaucuccauacccugcaugggcucuaaagcaucuucuccccacgggcucggcucccccuuaguagccagcccccgccucgagaaaagauuaggcggacuagccccucaaagagguuccagaauauccguucucuccgcuuccccagucuccgacguauccuacauguucggcagcucccagucccugcuccacuccuccaacuccucacaccaaucaucaucucgcucacucgaauccccggcaaacuccuccuccucacuacacucccucggaucuguaucgcucugcacccgacccuccgacuuccaagcgccccgaaacccaacccucaccaugggccaaccccgcacaccacacagcccaccccucgccaaagaacacgccuccagcugcccaccaucgauaaccaacuccaugguagacaucccgauaguauuaauaaacggcugcccugaacccggaucuuccccuccacagcggaccccuggccaucaaaauuccguccaaccaggcgccgcgucccccucgaaccccugccccgccacucguucgaacucacaaacacucuccgacgccccuuucacaaccuguccagaaggcccagcacgugacaugcaacccacaaugaaauucgugauggauacaucaaaauacugguucaaacccaacaucaccagagaacaagcaaucgaacuacuacgcaaagaagaaccaggcgcauucgucauacgcgacuccuccucauacaggggcagcuuugggcucgcccucaaagugcaagaaguuccagccucugcccaaucucgccccggcgaagacucaaacgaccucauccgccauuuccuaauagaauccuccgcaaaaggaguccaccucaaaggcgccgacgaagaaccauacuucggaucccucucagccuucguaugccaacacuccauaauggcccuagcacuaccgugcaaacucaccauaccccagcgagagcuaggcggcgcagacggagccuccgacuccacagacaguccggcauccugccaaaagaaaucagccggcugucacacucucuaccucucuucaguuuccgucgaaacccucacaggugcccuugcuguacaaaaagccaucuccaccacauucgaaagggacauacuacccacccccacagucguccacuucaaaguaaccgaacaaggcaucacccuaaccgacguacagcgcaaaguauucuuccgucgacacuacccacugaccacgcuacgauucugcggcauggacccagaacaacgaaaauggcaaaaauacugcaaacccucauggaucuucggcuucguagccaaaucccaaaccgaaccccaagaaaacgucugccaccuauucgccgaauacgacauggugcaacccgccucccaagugaucggccuugucacggcccuacuacaagacgcagaacgcauguaa

SEQ ID NO: 4153 - RNA, 1302 nt, Artificial Sequence
  AAH06510 variant
auggcccuacgcgucacccgcaacagcaaaauuaacgcagagaacaaggccaagaucaacauggccggcgccaaacgaguccccacagcccccgcugccaccuccaagcccggccuacgccccagaaccgcacucggcgacaucggcaacaaagucagcgaacaauuacaagcaaaaaugcccaugaaaaaggaagccaaaccuuccgcaaccggcaaagucaucgacaagaaacuccccaaaccccucgaaaaagucccaaugcucgugccagucccagucuccgagccaguaccagagcccgaaccagaacccgaaccagaacccguuaaagaagaaaaacucuccccagaaccuauccuaguagauaccgccucucccucacccauggaaacguccggcugcgcaccagcagaagaagaccuaugccaagccuucagcgacgucauccucgccgucaacgacgucgacgccgaagacggcgccgaccccaacuuaugcucggaauacgugaaagacaucuacgccuaccugcgccaacucgaagaagaacaagcaguaagacccaaauaccuccucggccgcgaaguuaccggcaacaugcgcgcaauacuaauagacuggcuaguccaaguacaaaugaaauuccgccuacuacaagaaacaauguacaugaccgucucaauaaucgaccgcuucaugcaaaacaacugcgucccaaagaaaaugcuccagcuaguaggcguaaccgccauguucaucgccucaaaauacgaagaaauguacccacccgaaaucggggacuucgccuucgucacagacaacacauacaccaaacaccaaauacgccaaauggaaaugaaaauccuacgcgcccuaaacuucggacucggacgaccccucccccuccacuuccuccgccgcgcauccaaaauaggagaggucgacgucgaacaacacacacucgccaaauaccuaauggaacuaacaaugcuagacuacgacaugguacacuucccacccucccaaauagccgccggcgccuucugccucgcucuaaaaauccuggacaacggcgaguggacacccacccuccaacacuaccuaucguacacagaagaaucccugcuucccgucaugcaacaccucgccaaaaaugucgucauggucaaccaaggacucaccaaacacaugacggucaaaaacaaauacgccaccuccaaacacgcaaaaaucagcacccuuccccaacugaacucagcccugguacaagaccucgcaaaagcaguggccaaaguauaa

SEQ ID NO: 4154 - RNA, 888 nt, Artificial Sequence
  AAA58392 variant
auggagcaccagcuccugugcugcgaaguggaaacgaucaggcgcgcguacccggacgcgaaccugcucaacgaccggguccugcgcgcgaugcucaaagcagaagaaaccugcgccccgagcguaagcuacuucaaaugcguccaaaaggaagugcucccaagcaugcgcaaaaucguagccacauggaugcucgaagucugcgaagaacaaaagugcgaagaagaggucuucccccuggccaugaacuaccucgaucgcuuccucucacucgagccagucaaaaagagccgacuccagcuccuaggcgcaaccuguauguuugucgcgagcaagaugaaggaaacgaucccgcucacagccgaaaaacuaugcauauacacggacaacagcauacgcccagaagaacuccuacaaauggaacuacuccuagucaacaaacuaaaauggaaccuggccgcaaugacgccccacgacuucaucgaacacuuccucucaaaaaugcccgaggccgaagaaaacaaacagaucauacgcaaacacgcgcaaacauucguggcccugugcgcgaccgacgucaaauucauaagcaacccgcccagcauggucgccgcaggaagcgucgucgcggccguccaagggcucaaccucagaagcccgaacaacuuccugagcuacuacaggcucacgcgcuuccuaucccgcguaaucaaaugcgaccccgacugcuuacgcgcaugccaggaacagaucgaggcccugcucgagagcucgcucaggcaagcgcaacagaacauggacccgaaagcggccgaggaagaggaagaggaagaggaagaagucgaccucgcgugcacgcccacggacguacgagacgucgacaucuag

SEQ ID NO: 4155 - RNA, 651 nt, Artificial Sequence
  AAA36601 variant
augcuccgccucuccgaacgcaacaugaaaguccuccucgccgccgcccuaauagccggcucaguauucuuccuccuacuacccggccccuccgccgcagacgaaaagaagaaaggccccaaagucacagucaaagucuacuucgaccuccgaaucggcgacgaagacgucggccgcgucaucuucggccucuucggcaaaaccguaccaaaaaccgucgacaacuucgucgcacucgccacaggcgaaaaaggcuucggcuacaaaaacuccaaauuccaccgcgucaucaaagacuucaugauccaaggcggcgacuucacccgcggcgacggcaccggcggcaaaucaaucuacggcgaacgcuuccccgacgaaaacuucaaacucaaacacuacggccccggcugggucuccauggccaacgccggcaaagacaccaacggcagccaauucuucauaacaacagucaaaacagccuggcuagacggcaaacacgucgucuucggcaaaguccucgaagggauggaaguaguacgcaaagucgaaagcacaaaaaccgacucccgcgacaaaccccuaaaagacgucaucaucgccgacugcggcaaaaucgaagucgaaaagcccuucgccaucgcaaaagaauaa

SEQ ID NO: 4156 - RNA, 1044 nt, Artificial Sequence
  AAD10634 variant
augccccgcgggcaaaaauccaaacuccgagcccgagaaaaacgccgcaaagcccgagaagaaacccaaggccucaaaguagcccacgcaaccgcggccgaaaaagaagaaugcccauccagcucgcccguccucggagacacacccaccuccucccccgcugccggaauaccccaaaaaccccaaggugcacccccaaccaccaccgccgcagccgccgucagcugcaccgaauccgacgaaggagccaaaugccaaggagaagaaaacgccuccuucucccaagcaaccacaucaaccgaaucauccgucaaagaccccgucgccugggaagccggcaugcucaugcacuucauccuacgcaaguacaaaaugagagaacccauaaugaaagcagacaugcucaaagucgucgacgaaaaauacaaagaccacuucacagaaauccucaacggcgccucacgccgccucgaacucgucuucggccuagaccuaaaagaagacaaccccagcggccacaccuacacgcucgucuccaagcuaaaccucacaaacgacggcaaucucuccaacgacugggacuucccccgcaacggacuccuaaugccacuccucggagucaucuuccuaaaaggaaacucagcaacagaagaagaaauauggaaauucaugaacguacucggagccuacgacggcgaagaacaccucaucuacggcgaaccccgcaaauucauaacacaagaccucguacaagaaaaauaucucaaguacgaacaagucccaaacagcgacccaccccgauaccaauuccuauggggaccccgcgcauacgcagaaaccaccaaaaugaaaguccucgaguuccucgccaaaaugaacggcgccacaccccgagacuuccccucccacuacgaagaagcccuccgagacgaagaagaacgcgcccaaguaagaagcuccguucgcgccaggcgccggaccacagccaccacauuccgcgcacgcucccgcgcacccuucagccgcagcucgcacccaauguaa

SEQ ID NO: 4157 - RNA, 2436 nt, Artificial Sequence
  BAF91373 variant
auggaaucgcagggagucccaccagguccuuaccgcgccacaaaacuuuggaacgaaguuacaacaucauuccgagcuggaaugccucuaagaaaacaccgccaacacuucaagaaauacggcaacugcuucaccgccggcgaagccguagacuggcucuacgaccuccuacggaacaacucgaacuucggcccagaagucacccggcaacagaccauccaacuccuucgcaaauuucucaaaaaccacgucaucgaggacaucaaaggccgauggggcucagaaaacgucgacgacaacaaccaacucuuccgcuucccagccacgucaccccucaaaacacucccccgccgcuaucccgaacuacgcaaaaacaacaucgaaaacuuuuccaaagauaaagacuccaucuucaaacucagaaacuuauccagacgcacccccaagcgucacggccuccacuugucacaagaaaacggcgagaaaauaaaacacgaaaucaucaaugaagaccaagaaaaugccauagacaaccgcgaacucucgcaggaagacguagaagaaguauggcgauacgucauccucaucuaccuccagaccauucuuggagugccaucccucgaagaggucaucaaccccaaacaagucaucccacaguacauaauguacaacauggcaaacacuagcaagcgcggcguagugauacuacaaaauaaauccgacgaccucccccacuggguccuauccgccaugaaaugccuagccaauuggccccgaucaaacgacaugaacaaccccacauacgugggcuucgaacgcgaugucuucagaaccauugcugacuacuuccucgaccucccagaaccccuucucaccuucgaguacuaugaacucuucguuaacauacucguaguaugcggcuacaucacgguauccgaccgcuccagcggaauccacaaaauccaagacgacccccaauccuccaaauuccuacaccucaacaaccucaacucuuucaaauccaccgaaugccuucuccuaucacuacuacaucgugagaaaaacaaagaagaaucagacucaacagaacgccuacaaaucucaaaccccggauuccaagaacggugcgcuaagaaaaugcaacucgucaaccuucgcaaccgacgagucuccgccaaugacaucaugggcgguuccugccacaaccucaucggccucuccaacaugcacgaccucucaaguaacuccaaaccccgaugcugcagccucgaaggcaucgucgacguacccggaaacagcuccaaagaggcaucaagcguauuccaccagagcuuucccaacaucgaaggucaaaacaacaaacuauuccuugaaucuaaacccaaacaggaguucuuacuuaacuuacauucugaggaaaacauacaaaaacccuucucggcuggcuucaagcgcaccuccacacucacuguccaagaucaggaggaauuauguaacggcaaaugcaaauccaagcaacucugccgaucccaaucacuccugcuccgauccagcacacgacgaaauucauauauaaacacgccggucgccgaaauaaucaugaagcccaacguaggacagggcuccaccucaguacaaaccgccauggagucugaacucggcgaauccucggccacgaucaacaaacggcuaugcaagucaacaaucgaacuaucugaaaauagccuccuucccgcuucaucuaugcugacaggcacccaaucccuacuccaaccccaccucgaacguguugcuaucgacgcccuacaacuaugcugucuccuccucccucccccaaaccgaagaaaacuacaacuccucaugcgcaugauuucccgcaugucccaaaacguggacaugccaaaacuccacgacgccaugggcacccguucacucaugauacacaccuucucccgcugcguucucugcugcgcagaagaagucgaccuagaugaacuacuggcaggacgccuagucucuuuccucauggaccaccaccaagaaauccuccaaguccccuccuaccuacaaacagcggucgaaaaacaccuagacuaccucaagaaaggccacaucgaaaaucccggcgacggacuauucgccccacucccaaccuacuccuacugcaaacaaauauccgcacaagaguucgaugaacagaaaguuucaaccucacaagccgcaauagcagaacuucuagaaaacaucaucaaaaaccgcucgcugccccuaaaagaaaaacgaaagaaacuaaaacaauuccagaaagaauacccccucauauaccagaaacgcuuucccacuacugaauccgaagccgcccuauucggcgacaaacccaccauaaaacaacccaugcuaauccuaagaaaacccaaauuccgaucgcuccgguaa

SEQ ID NO: 4158 - RNA, 297 nt, Artificial Sequence
  AAA46940 variant
augcacggcgacacccccacccuacacgaauacaugcucgaccuccaacccgaaaccaccgaccucuacugcuacgaacaacucaacgacuccuccgaagaagaagacgaaaucgacggccccgccggccaagccgaacccgaccgcgcccacuacaacaucgucaccuucugcugcaaaugcgacuccacccuccgccucugcguccaauccacccacgucgacauccgcacccucgaagaccuccucaugggcacccucggcaucgucugccccaucugcucccaaaaacccuaa

SEQ ID NO: 4159 - RNA, 318 nt, Artificial Sequence
  AAA46947 variant
augcacggccccaaagccacccuccaagacaucguccuccaccucgaaccccaaaacgaaauccccgucgaccuacucugccacgaacaacucuccgacuccgaagaagaaaacgacgaaaucgacggcgucaaccaccaacaccuccccgcccgccgcgccgaaccccaacgccacaccaugcucugcaugugcugcaaaugcgaagcccgcaucaaacucgucgucgaauccuccgccgacgaccuccgcgccuuccaacaacucuuccuaaacacccucuccuucgucugccccuggugcgccucccaacaauaa

SEQ ID NO: 4160 - RNA, 297 nt, Artificial Sequence
  AAA46951 variant
augcgcggcgaaacccccacccuccaagacuacguccucgaccuccaacccgaagccaccgaccuccacugcuacgaacaacuccccgacuccuccgacgaagaagacgucaucgacucccccgccggccaagccgaacccgacaccuccaacuacaacaucgucaccuucugcugccaaugcaaauccacccuccgccucugcguccaauccacccaagucgacauccgcauccuccaagaacuccucaugggcuccuucggcaucgucugccccaacugcuccacccgccucuaa

SEQ ID NO: 4161 - RNA, 294 nt, Artificial Sequence
  AAA46959 variant
augcgcggccacaaacccacccucaaagaauacguccucgaccucuaccccgaacccaccgaccucuacugcuacgaacaacucuccgacuccuccgacgaagacgaaggccucgaccgccccgacggccaagcccaacccgccaccgccgacuacuacaucgucaccugcugccacaccugcaacaccaccguccgccuaugcgucaacuccaccgccuccgaccuccgcaccauccaacaacuccucaugggcaccgucaacaucgucugccccaccugcgcccaacaauaa

SEQ ID NO: 4162 - RNA, 300 nt, Artificial Sequence
  AAA46967 variant
augcacggcgaaaucaccacccuccaagacuacguccucgaccucgaacccgaagccaccgaccucuacugcuacgaacaacucugcgacuccuccgaagaagaagaagacaccaucgacggccccgccggccaagccaaacccgacaccuccaacuacaacaucgucaccuccugcugcaaaugcgaagccacccuacgacucugcguccaauccacccacaucgacauccgcaaacuagaagaccuccucaugggcaccuucggcaucgucugccccggcugcucccaacgcgccuaa

SEQ ID NO: 4163 - RNA, 330 nt, Artificial Sequence
  AAA47051 variant
augcgcggccccaaacccacccuccaagaaaucguccucgaccucugccccuacaacgaaauccaacccgucgaccucgucugccacgaacaacucggcgaauccgaagacgaaaucgacgaacccgaccacgccgucaaccaccaacaccaacuccucgcccgccgcgacgaaccccaacgccacaccauccaaugcuccugcugcaaaugcaacaacacccuccaacucgucgucgaagccucccgcgacacccuccgccaacuccaacaacucuucauggacucccucggcuucgucugccccuggugcgccaccgccaaccaauaa

SEQ ID NO: 4164 - RNA, 321 nt, Artificial Sequence
  CAA52574 variant
augcauggcccgcgcgagaccuugcaagagaucgugcuccaucucgagccccagaacgagcucgaucccguggacuugcucuguuacgagcaacugagcgagagcgaggaagagaacgaugaagcggacggggucucgcacgcacaauugcccgcgcgcagggccgagccccagcgccauaaaauacucugugucuguugcaagugcgauggcaggaucgagcucacggucgagagcucggccgaggacuugcgcacgcuccagcaauuguucuugagcacgcucucguucgugugcccguggugugccacgaaccaguga

SEQ ID NO: 4165 - RNA, 306 nt, Artificial Sequence
  M62877.1 variant
augcgcggcaacgucccccaacucaaagacgucguacuccaccucaccccccaaaccgaaaucgaccuccaaugcuacgaacaauucgacuccuccgaagaagaagacgaagucgacaacaugcgcgaccaacuccccgaacgacgcgccggccaagccaccugcuaccgcaucgaagcccccugcugccgcugcuccuccgucguccaacucgccgucgaauccucaggcgacacccuccgcgucguccaacaaaugcucaugggcgaacucucccucgucugccccugcugcgccaacaacuaa

SEQ ID NO: 4166 - RNA, 300 nt, Artificial Sequence
  CAA52586 variant
augcgaggcgacaaagccaccaucaaagacuacauccucgaccuccaacccgaaaccaccgaccuccacugcuacgaacaacuaggcgacuccuccgacgaagaagacaccgacggcgucgaccgccccgacggccaagccgaacaagccaccuccaacuacuacaucgucaccuacugccacuccugcgacuccacccuccgccucugcauccacuccaccgccaccgaccuccgcacccuccaacaaaugcuccucggcacccuccaagucgucugccccggcugcgccagacucuaa

SEQ ID NO: 4167 - RNA, 318 nt, Artificial Sequence
  CAA52597 variant
augcacgggaaagugcccacgcuccaggacgugguccuggaauugaccccgcaaacggaaauagacuugcaauguaacgagcaauuggacucgagcgaggacgaggacgaggacgaggucgaucacuugcaagagcgcccgcaacaggccagacaagcgaaacagcacacgugcuaucucauacacgugcccuguugcgagugcaaguucgugguccagcucgauauccagagcacgaaagaggaccugcgcguaguccagcaauugcucaugggcgcgcucacggucacgugcccgcucugugccucgagcaauuga

SEQ ID NO: 4168 - RNA, 297 nt, Artificial Sequence
  AAF13691 variant
augcgaggcaacaaccccacccuccgcgaauacauccucgaccuccaccccgaacccaccgaccucuucugcuacgaacaacucugcgacuccuccgacgaagacgaaaucggccucgaccgccccgacggccaagcccaacccgccaccgccaacuacuacaucgucaccugcugcuacaccugcgacaccaccguccgccucugcaucaacuccaccaccaccgacguccgcacccuccaacaacuccucaugggcaccugcaccaucgucugccccuccugcgcccaacaauaa

SEQ ID NO: 4169 - RNA, 324 nt, Artificial Sequence
  ACL12335 variant
augcacggccccaaagccacccucugcgacaucguccucgaccucgaaccccaaaacuacgaagaagucgaccucgucugcuacgaacaacuccccgacuccgacucagaaaacgaaaaagacgaacccgacggcgucaaccacccccuccuccucgcccgccgcgccgaaccccaacgccacaacaucgucugcgucugcugcaaaugcaacaaccaacuccaacucgucgucgaaaccucccaagacggccuccgcgcccuccaacaacucuucauggacacccucuccuucgucugcccccucugcgccgccaaccaauaa

SEQ ID NO: 4170 - RNA, 318 nt, Artificial Sequence
  AAA79500 variant
augcacgggaaagugcccacgcuccaggaagugaucuuggaauuggccccgcaaacggaaauagaccugcaauguaacgagcaacuggacucgagcgaggacgaggacgaggacgagaucgaucaccuccuggagcgcccgcaacaggccaggcaagcggaacagcacaagugcuaucucauacacgugcccuguugcaagugcgagcucgugguccagcucgauauccagagcacgaaagaggaauugcgcgugguccagcaacugcucaugggcgcgcucacggucacgugcccgcucugugccucgagcaaguga

SEQ ID NO: 4171 - RNA, 1392 nt, Artificial Sequence
  AAF80488 variant
augggcaaagagaaaacccacauaaacaucgucgugauaggacacguagacucaggcaaaagcacaaccaccggccaccucaucuacaaaugcggaggcauagacaaaagaacaaucgaaaaguucgaaaaagaagcagccgaaaugggcaaagggagcuucaaauacgccuggguacuagacaaacuaaaggccgaacgcgagcgaggaauaacgaucgacaucagccuauggaaauucgaaacgaccaaauacuacauaacaaucauagacgcgcccgggcacagagacuucaucaaaaacaugaucacgggaaccagccaagccgacugcgcaguccucaucguggcggccggaguaggagaguucgaagcaggcauaagcaaaaacggacaaacaagagaacacgcccuccuagccuacacccugggagucaagcaacuaaucgucggcgucaacaaaauggacagcacagaacccgcauacagcgaaaaacgcuacgacgaaaucgucaaggagguaagcgcauacauaaagaaaaucggguacaaccccgccacaguccccuucgucccaauauccggcuggcacggagacaacaugcuagaaccaagcccaaacaugcccugguucaaaggcuggaaagucgaaagaaaagaaggcaacgccagcggcguaagccuacucgaggcccuagacacaauccuacccccaacccgccccacggacaaaccccuccgccuaccccugcaagacgucuacaaaaucggaggcaucggcaccguccccgucggaagagucgaaaccggaauacugcgaccaggcaugguaguaaccuucgccccaguaaacaucacaaccgaaguaaaaucaguggagaugcaccacgaagcccuaucagaagcacuccccggggacaacgugggauucaacgucaaaaacguaucagucaaagacauacgccgcggcaacgucugcggcgacagcaagagcgacccaccccaagaagccgcacaauucacgagccaaguaaucauacuaaaccacccaggccagauaucagcgggauacagccccguaaucgacugccacacagcccacauagccugcaaauucgccgaacuaaaagagaaaauagaccgaagaucaggcaagaagcucgaagacaacccaaagagccucaaaagcggagacgcagcgaucguggaaaugguccccggcaagccaaugugcguagaaucauucucacaauacccgccccuaggccgauucgccguccgcgacaugaggcaaaccgucgcagucggagucaucaaaaacgucgagaagaaaagcggaggcgcaggaaaaguaacaaaaagcgcccaaaaagcacaaaaagcaggaaaguga

SEQ ID NO: 4172 - RNA, 2919 nt, Artificial Sequence
  EAW51573 variant
auggacacagaccuauaugacgaguucgguaacuacauaggccccgaacuagacucggacgaggacgacgacgaacuugggcgagaaacaaaagaccuagaugaaauggacgacgaugacgacgacgacgacguaggcgaucacgacgacgaccaucccggaauggaagucguccuccacgaagauaagaaauauuaccccaccgccgaggaagucuacggaccagaagucgaaacaaucguccaagaagaagacacacaaccccucaccgaacccaucaucaaacccguuaaaacaaagaaauuuaccuuaauggaacaaacuuuaccugucacgguauaugaaauggacuuccuggccgaccuaauggacaacagcgaguuaauccguaacgucacccucugcggacaccuccaccacgggaaaacaugcuuuguugacugccucaucgaacaaacucacccagaaauacgcaaaagguacgaucaagaccucuguuacacagacauccuuuucacugagcaagaacgaggcguugguauaaaauccacccccgucaccgucguccuacccgacaccaaagggaaaucguaccuauucaauauaauggacacacccgggcacgucaacuuuuccgacgaggucaccgccggccugcgaaucuccgacggcgucguucuguucaucgacgcagccgaagggguaaugcucaacacagagcgccuaauaaaacacgcaguacaagagagacuagcagucaccguaugcauaaacaagaucgaccgacuaauacucgaacuaaagcucccgccaacugacgcauauuacaaacuccgccauaucgucgacgaaguuaacggacuuauaucaauguauucaaccgacgaaaaucucauucuuuccccacuacuuggcaacgucuguuucuccagcucccaauacucaauaugcuucacccuagguagcuucgccaaaaucuacgccgacaccuucggagacauuaacuaccaagaguucgccaaacggcucuggggagacaucuauuuuaaccccaaaacacgaaaauucaccaagaaagcgccaaccucaucaagucaacgaucguucgucgaguucauccucgaacccuuauacaaaauccuagcccaaguggucggcgaugucgacaccucccuaccaagaacccuggacgaacugggcauccaccucacgaaagaagaacucaaacuaaacauacgaccccuccuccgauuaguaugcaagaaauucuuuggcgaguuuacaggauucgucgacaugugcguacaacacauacccucccccaaagucggagccaaacccaaaaucgaacacaccuacacgggaggagucgacuccgaccucggagaagcuaugagcgacugugacccagauggcccacuaaugugccacacaaccaaaauguacucaacagacgacggcguucaauuccacgccuucggccggguacucuccggcaccauccacgcaggccagccagugaaagugcucggagaaaauuacaccuuggaagacgaagaagacucacaaaucugcacaguaggccgacucuggauaucagucgcccgcuaccacaucgaaguaaaucggguccccgccggaaauuggguacuaaucgaaggcgucgaccaaccaauagucaagacggccacuauaaccgaaccacgcgguaacgaagaagcgcaaauauuccggccauuaaaauuuaacaccacauccguaaucaaaaucgcaguagaaccaguuaaccccuccgaacuacccaaaaugcuagacggccuccgcaaaguaaacaaaucauaccccagccucacuacaaaaguagaggaaucgggcgaacacgucauacuaggaaccggagaacucuaucuagacugcgucaugcacgaucuucggaaaauguacuccgagaucgacauaaaagucgcagaccccgucguuacauucugcgaaacagucgucgaaaccuccucacucaaaugcuuugccgaaacaccuaacaagaaaaacaaaaucacuaugaucgcggagccacuagaaaaaggucuagcggaggacaucgaaaacgaagucgugcaaaucaccuggaaccgaaagaaacuuggcgaguucuuccaaacuaaauacgacugggaccuucuagcggcccgcucuaucugggcauucggacccgacgcaaccggcccaaacauccuaguagacgacacccucccauccgaagucgacaaagcacuacuaggcucgguaaaagacucaauagugcaaggauuccaaugggguacccgugaaggaccucuaugcgacgagcucauccgcaacguaaaauucaaaauccucgacgcagucgucgcucaagaaccccuacaccgaggagguggccagauaauacccacggccagacguguggucuacucagcuuuccuaauggcgaccccucgccucauggaacccuauuacuucgucgaaguacaggcccccgccgacugcgugagcgccgucuacacuguacucgcccgucgaagaggacacgugacccaagacgcgcccauccccggcuccccgcuauacacaauaaaagcauucaucccggcaaucgacuccuucggcuucgaaacagaccucagaacccacacacagggccaggcauucucucucuccgucuuccaccacuggcaaaucguuccgggggacccccuggacaaaucaauagucauaaggccccucgagccccaacccgcgccccaucuagcccgcgaguucaugaucaaaacacgcaggagaaaaggacucucugaagaugucucaauaagcaaauucuucgaugacccaaugcuacucgagcucgccaaacaagacguugugcucaacuacccaauguaa

SEQ ID NO: 4173 - RNA, 1971 nt, Artificial Sequence
  EAW50963 variant
augcgcccaucaggaaccgcaggcgcagcgcuccuggcacuacucgccgcccuuugucccgccucccgcgcacucgaagaaaagaaagucugccaaggaacgagcaauaaacuaacccaacuagggacauucgaagaccacuuccuaucucuccaacgaauguucaacaauugcgaagucguccucgguaaccuagagaucacauacguacaaagaaacuacgaccuaucauuccucaaaaccauacaagaggucgcaggcuacguacucauugcgcugaacacagucgagcgaaucccccucgaaaaccuacaaauaauccggggcaacauguacuacgaaaacaguuacgcccuagccgugcuaagcaacuacgacgccaacaaaaccggccucaaagaacuaccaaugagaaaccuccaagaaauccuacacggcgccgugcgcuuuucaaacaacccugcccucugcaacguagagagcauucaauggcgcgacauagucucaucagacuuccuaagcaacauguccauggacuuccaaaaccaccucggaucaugccaaaaaugugaccccuccugccccaacggcucaugcuggggagcaggcgaagaaaacugccaaaaacuaacaaaaaucauaugcgcgcaacaaugcucaggccgcugccgcggcaaaagcccgagcgauugcugccacaaucaaugcgccgccggcugcacaggcccccgggaauccgacugucuugucugccgaaaauuccgcgacgaagcaaccugcaaagacacaugcccaccccucaugcucuacaaccccacaacuuaccaaauggacgucaacccugagggcaaguacucauucggcgccacaugcgugaaaaagugcccccgcaacuacguagucaccgaccauggcucaugcgucagagccugcggagcagacucauaugaaauggaagaagacggaguacgaaagugcaagaaaugcgaagggccaugccgaaaagugugcaacgggauaggaauaggcgaguucaaagacagcuuaucaaucaacgcaaccaacaucaagcacuucaaaaacugcacaucaaucucgggcgaccuucacauacuccccguagccuuccgcggagacagcuucacccacacucccccacuugacccacaagaacucgacauacuuaaaaccgucaaagaaauaacuggauuucuacucauacaagccuggccagaaaacagaacugaccuccacgccuucgaaaaccuagaaauaauacgaggccgaacgaaacaacacggccaauucucacuugccgucgucucacuuaauaucaccucacuaggccugcguucacucaaagaaaucuccgacggcgacgucaucaucucaggcaacaaaaaccucugcuacgccaacacaauaaacuggaagaaacuauucggaaccagcggccagaaaaccaaaaucaucucgaaccgaggagaaaacuccugcaaagccacaggccaagucugccacgcacucugcucacccgaaggcugcuggggccccgaaccgcgcgacugcgucuccugccgcaaugucucccgcggccgagaaugcgucgauaaaugcaaccuccuagaaggcgaaccgcgcgaguucguggaaaacuccgaaugcauacaaugccaccccgaaugccuaccccaagccaugaacauaaccugcacgggccgaggacccgacaacugcauccaaugugcacauuacaucgacgggccacacugcguuaaaaccugccccgcgggcgucaugggcgaaaacaacacccuggucuggaaauacgccgacgccggccacgucugccaccucugucaccccaacugcaccuauggcugcacaggcccaggucucgaaggcugcccaaccaacggaucauacauaguaagccacuucccgcgauccuucuacaaaaugucuguccac

SEQ ID NO: 4174 - RNA, 3411 nt, Artificial Sequence
  ADL28125 variant
augagacccagcggcacagcuggcgcagcacuacuggcccuccuggcagcucucugccccgcaucccgugcccuggaagaaaagaaagucugccaagggaccagcaacaaacuaacccaacugggcacauucgaggaccacuuccucucacuccagcgcauguucaacaacugcgaagucgugcuaggcaaccuagaaaucaccuacguacagcgaaauuacgaccuuuccuuccugaaaaccauacaagaagucgcuggguacgugcucaucgcacuaaauaccgucgagagaauaccucuagaaaacuuacaaaucauacggggaaacauguauuacgaaaacuccuaugcgcuagcuguccuuaguaauuacgacgcaaacaaaacgggccucaaagaacuccccaugcgaaaucuacaagaaauucuucacggagcgguacgcuuuagcaauaacccagcacuaugcaacgucgaaaguauccaauggcgcgauaucguaucuuccgacuuccugagcaacaugagcauggacuuccaaaaccaccugggcagcugccaaaaaugcgaccccagcuguccaaacggcagcugcuggggcgcgggcgaagagaacugccaaaaacucacaaaaauaaucugcgcucaacaauguagcgggcgcugccgcggaaaaucccccucagacugcugccacaaccagugcgccgccggcuguacaggaccacgcgaaucagacugccuggugugccgcaaauuccgagacgaagcaaccugcaaagacacaugcccaccauuaaugcucuacaaccccacaacauaccaaauggacgucaacccagaaggcaaauacucguucggagccacaugcgucaagaaauguccaaggaacuacgucguaaccgaucacggcuccugcguacgcgcaugcggcgccgauucuuacgaaauggaagaggauggaguacgcaaaugcaagaaaugcgaaggucccugccguaaaguaugcaauggcaucggcaucggagaguuuaaagacucacuguccaucaacgcuacaaacauaaaacacuucaaaaacugcaccaguaucuccggggaccuucacauccucccagucgcuuuccgaggcgacagcuucacacacaccccaccccuugacccccaagaacuugacauucucaagacaguaaaagaaaucacagguuuccuacuuauccaagcauggcccgaaaacagaaccgaccuccacgcauucgaaaaucucgaaaucauacgcgggcgcaccaagcaacaugggcaguucucgcuggcaguggugagccuaaacaucacaucgcucggccuccggucccuaaaggagaucuccgacggcgacgucaucaucaguggcaauaagaaccucugcuaugcaaacacaaucaacuggaagaaauuauucggcaccucgggccagaaaacaaaaaucaucuccaaccguggcgaaaacuccugcaaagccaccggccagguaugccaugcccuaugcagccccgaaggcugcugggggcccgagccccgcgacugcguuuccugccgaaacguaucgaggggucgcgaaugcgucgacaaaugcaaucuccuagaaggagagccccgcgaguucgucgaaaacuccgaaugcauacagugccaccccgaaugccuuccccaggcuaugaacauaacaugcacuggaagaggccccgauaauuguauacaaugcgcccauuacaucgaugguccacacugcgucaaaacaugucccgccggcgugaugggcgaaaacaacacccuaguauggaaauaugccgacgcuggucacgucugccaccucugccacccaaacugcaccuacgggugcacaggaccuggccucgaaggcuguccgacuaacggaccgaaaauucccuccaucgccacaggaauggugggcgcccuacuccuauuacucgucguagcacuaggcauaggccuauucaugcgccgccgccacaucguacgcaaacgaacccuacgacgccuguugcaagaacgcgaauuggucgaaccacuaacccccucaggcgaagccccgaaccaggcacuccuuagaauccugaaggaaacagaguuuaaaaagauuaaaguccuaggcuccggagcguucgggacgguuuacaaaggacuauggauccccgagggcgaaaaggucaaaauccccgucgcaaucaaagagcuacgcgaagcuacuucaccgaaagccaacaaagaaauccucgacgaggccuacgugauggcguccgucgacaacccccacgucugcagacuccucgggauaugccuuacauccacgguccaacucauuacacagcucaugcccuucggaugccuccuagacuacguacgagaacacaaagacaauauaggaucacaguaucuacucaacuggugcguccaaaucgcaaaaggaaugaacuaccucgaggaccgacggcuaguacaccgagaucucgccgcaagaaacguccuaguaaaaaccccacaacacgugaaaaucacagacuucggccuagcgaaacuucuaggagcagaggagaaggaauaccacgccgagggaggcaaagugccaauaaaauggauggcccuggagucaauacuacaccgaaucuacacccaccagucagacgucuggagcuacggagucacagucugggaauugaugaccuucggcuccaaacccuacgacggaauaccggccagcgaaaucagcagcaucuuagaaaagggagaaagacucccacaaccgcccauaugcaccaucgauguauacaugauaaugguuaaaugcuggaugauagacgcagacucccgucccaaauuccgcgaacucaucaucgaguucuccaaaauggcacgcgacccccaacgauaccugguaauccaaggggacgaacgaaugcaccuacccaguccaaccgacagcaacuuuuaccgagcacuaauggacgaagaagacauggacgauguagucgacgcugacgaauaccuaaucccgcaacaaggguucuucucuucucccagcacaucgcgaacaccccuacugucaagccuuucagccacaucaaacaacuccaccgucgccugcaucgaucgcaauggucuucaguccugcccaaucaaagaagacuccuuccuccagcgcuacuccagcgaccccaccggagcgcuaacagaagacucuauugacgauacauuccuuccagucccgggggaauggcucguguggaaacaauccugcucguccaccagcuccacccacagcgccgcagcauccuuacagugccccucccagguccucccucccgcaucccccgaaggcgaaaccguggcggaccugcaaacgcaauaa

SEQ ID NO: 4175 - RNA, 150 nt, Artificial Sequence
  CCO13722 variant
augugcgccaccugcgccauccaaaccgcccccaccggccccaacaaauccucccucuccgacuucucccucccccucaaacuccacuuccucuccaccaucuccaucucccccuucgccuccaacaaaguccucacccucuucaucuaa

SEQ ID NO: 4176 - RNA, 1218 nt, Artificial Sequence
  CCDS47587.1 variant
augcgccccuccggcaccgcuggcgccgcucuacucgcccuacucgcggcccucugccccgccuccagagcacucgaagaaaaaaaaguaugccaaggaaccucaaacaagcuuacccaacucggcacauucgaagaccacuuccuaucccuccaacgcauguucaacaacugcgaaguaguccuaggcaacuuagaaauaaccuacguccaacgcaacuacgaccuauccuuccucaaaaccauccaagaaguugcuggcuacguccuuauagcccucaacaccgucgaacgcaucccccucgagaaccuacaaaucauccgcggcaacauguauuacgaaaauuccuacgcacucgcgguucuauccaacuacgacgccaauaaaaccggccucaaagaacuucccaugcgcaaccuacaagaaauccuccacggcgccguacgcuucuccaacaacccagcccuaugcaacguagaauccauccaauggcgagacaucgucuccucugacuuccucucaaacauguccauggacuuccaaaaccaccucggcucaugccaaaaaugcgaucccuccugcccaaacggcuccugcuggggcgccggcgaagaaaacugccaaaaacuaaccaaaauaaucugcgcccaacaaugcuccggcagaugccgaggcaaaagcccaucggacugcugccacaaccaaugcgccgccgguugcaccggcccccgcgaauccgacugucuuguaugccgcaaauuccgcgacgaagccaccugcaaagauacgugccccccccucaugcuauacaacccaacaaccuaccaaauggacgucaauccagaaggcaaauacagcuucggcgccacaugcguaaaaaaaugcccccgcaacuaugucgucaccgaccacggauccugcguccgugccugcggcgccgacagcuacgaaauggaagaagacggaguccgcaaaugcaaaaaaugcgaaggccccugccgcaaagucugcaacggcaucggcauaggagaauucaaagacucccucucaauaaacgccacaaacaucaaacacuucaaaaacugcaccuccaucuccggcgaccuacacauccugcccgucgcauuccgaggcgacuccuucacccacacccccccccucgacccacaagagcuugacauacucaaaaccgucaaagaaaucacaggccucucauaa

SEQ ID NO: 4177 - RNA, 3633 nt, Artificial Sequence
  AAG35789 variant
augcgucccuccggcaccgccggcgcagcccuccucgcacuucuagcugcacuaugucccgcuuccagagcacucgaagaaaagaaaguaugccaaggaacaucaaauaaacucacacaacucgggaccuucgaagaucacuuucucucgcuacaacgcauguucaacaacugugaagugguccugggcaaucuagaaaucaccuacguacaacgcaacuacgaccucucauuucuuaaaaccauucaggaagucgccggguauguccuaaucgcccucaacacugucgaacgcaucccccuugaaaaccuucaaauaauaagaggaaacauguacuacgaaaacaguuacgcccuagcaguccuaagcaacuacgaugcaaacaaaacugggcuuaaagaacuacccaugagaaaccugcaagaaauacuacacggagcagugcgcuucuccaacaacccagcccucugcaacguggaguccauacaauggcgagacaucguguccagcgacuuccuaagcaacaugucuauggacuuccaaaaccaccucgggagcugccagaaaugcgauccuagcugucccaacggaagcugcuggggagcaggagaggaaaauugccaaaaacuaacaaagauaaucugugcucaacaguguagcggucgaugccgcggaaaauccccaucagacugcugucacaaccagugcgccgcaggcugcacgggcccccgggaaucagacugccucgucugcagaaaauuccgcgacgaagcuacaugcaaggacaccuguccaccccucaugcucuauaaucccacgacauaucaaauggacguaaaccccgaggguaaguacuccuucggagcaaccugcguaaagaaaugcccccggaacuacgucguaacagaccauggcagcugcguccgagcuugcggggccgacucauacgaaauggaagaagauggcguucgaaaaugcaagaaaugcgagggaccaugccgcaaaguaugcaacggcaucggcauaggagaauuuaaagacucacucagcaucaacgcgacaaacaucaaacacuucaaaaauugcaccuccauuaguggcgaucuacacauauuaccuguugcguuucgcggcgacucuuucacucacacucccccgcuugacccacaagaacuggauauccucaaaaccgucaaggaaauaaccggcuuucucuuaauccaagcauggcccgaaaaccgaacugacuuacaugcauucgagaauuuggaaaucauucgaggccggacgaagcagcacggccaguucucacucgccguagugucacucaacauuaccucgcucggccuccgcucacuuaaggaaaucagcgacggggacguuaucaucucaggaaacaagaaccugugcuacgcgaauacaauaaacuggaagaaacuauucggaacaucaggccagaaaacaaaaaucaucagcaaccgaggugagaacucaugcaaagcaacggggcaagucugccaugcgcucugcuccccagaagggugcuggggccccgaaccucgcgauugcgucuccugccgcaauguaucccgcggccgagaaugcguugacaaauguaaccuacuagaaggcgaaccccgcgaguucguagaaaacagcgaaugcauccaaugccacccggaaugccuuccccaggcaaugaacauuacauguacaggacgcggacccgacaacuguauccagugcgcacacuacauagauggaccccacuguguaaaaaccugcccagccggcgucaugggagaaaacaacacccuaguauggaaauacgcagacgcgggccacguaugccaucucugccacccuaacuguaccuacggcugcacaggcccaggccucgaaggcuguccaacuaacggaccuaaaauacccagcauagccaccggcauggucggcgcacuacuacuacuucuagucguagcccucggaaucggccuuuucaugcgccgcagacauaucgugcgcaaacgaacccuaaggcgucuccuacaagaaagggagcuugucgagccacucacaccuagcggcgaagcucccaaucaagcacuacuacgcauccucaaagaaacagaguucaagaaaauaaaaguacuaggcucgggggcauucggaacaguauacaaaggacucuggaucccagaaggagaaaaaguaaaaauacccgucgcaauuaaagaacuccgagaagcaaccucacccaaagcaaauaaggaaauacuagacgaagcauacguuauggccuccgucgacaacccccacgucugccgccuccucgggaucugccuuacgucgaccguccaacucaucacccagcuaaugccguucggaugucuacuagacuacguacgagaacacaaggacaacauaggaagccaguaucuccuaaacuggugcguccaaauagcaaaaggcaugaacuaccuugaagacaggcgucucguccaccgagaccuagccgcccgcaacgucuuagugaaaacuccacaacauguaaagaucacggacuuuggacuagccaaacuucucggcgcagaagaaaaagaguaccacgcagagggaggaaaaguccccaucaaauggauggcccucgaauccauacuccaccgcaucuacacccaccaaucagacgucuggagcuacggagugaccguuugggaacucaugaccuuuggcaguaaaccguaugacggcauaccagcgagcgaaauauccucgauauuagagaaaggcgaaaggcucccccaaccgcccaucugcacaaucgacgucuacaugaucauggucaaaugcuggaugauagacgcagacagcagacccaaguuccgggaacuaaucaucgaguucuccaaaauggcccgggacccucaacgguaccucguaauacagggcgaugaacgcaugcaccuacccuccccaaccgauaguaauuuuuaucgagcacucauggaugaagaagacauggacgacgucgucgacgccgaugaauaccucaucccucaacaaggcuucuuuagcagccccucuacaucacgaacaccacuguuaagcucccuuucagcaacaagcaacaacucgaccgucgcaugcaucgaccgcaacggccugcaaucaugcccaaucaaagaagacuccuuccugcaacgcuacuccucagacccuacaggcgcacuaacagaagauuccaucgacgacacauuccuaccaguaccagaauacaucaaccaaagcguaccaaaaaggccagcaggauccguccagaaucccguauaccauaaccaaccccucaacccugcaccgagccgagacccccacuaccaagacccccauaguaccgccgucggcaacccagaauaccuaaacaccguccaaccuacaugcguuaacagcacauucgacagcccggcacacugggcacaaaaaggaucgcaccaaaucucguuagacaacccagacuaccaacaagacuucuuccccaaagaagccaaaccuaacggaauuuucaaaggauccaccgccgaaaacgcagaauaccuacgcgucgcaccacaaucaagcgaauuuauuggggcuuga

SEQ ID NO: 4178 - RNA, 1395 nt, Artificial Sequence
  AAI18666 variant
auggcagccgaagacguaaucaucugcgcacaacaaugcucgggccgaugccggggcaaauccccaucagacugcugccacaaucaaugcgcugccggcugcacaggcccacgcgaaucagacugccuagucugccgaaaauucagagacgaagcaaccuguaaagacacaugcccgccccuuaugcucuauaaccccaccaccuaccaaauggacguaaacccugagggcaaauacucuuucggagcaaccugcgucaagaaaugcccacgaaacuacgucgucaccgaccacggaucgugcguccgcgccugcggcgcagacucauacgaaauggaagaagacggaguccgaaaaugcaagaaaugugaaggaccaugccgcaaagucugcaacggcaucggcauaggcgaauuuaaagacucacucucaaucaacgccacaaacauaaaacacuucaaaaacugcaccagcauuuccggcgaccuacacauacucccagucgccuuccgcggcgacagcuucacccacaccccaccccuagacccccaagaacucgacauccucaaaaccguaaaagaaaucaccggcuuccuccuaauccaagccuggccagaaaaccggaccgaccuccacgccuucgaaaaccucgaaauaauccgcggccgcaccaaacaacacggacaauucucccuugccguagucucccucaauauuaccagccuuggccuccgcucgcucaaagaaauuuccgauggagaugucaucauauccggaaacaagaaccuaugcuacgccaacaccaucaacuggaagaaacucuucggcaccuccggacaaaagaccaaaaucaucagcaaccgcggggaaaacagcuguaaagccaccggccaagucugccacgcccuaugcucccccgaaggaugcuggggccccgaaccgcgcgacugcguauccugccgcaacgucucccgaggccgagaaugcgucgacaaaugcaaccuacucgaaggagaaccccgcgaguucgucgaaaacucagaaugcauccaaugccaucccgaaugccuaccccaagccaugaauauaaccugcacaggccgaggccccgacaacugcauccaaugcgcccacuacaucgacggcccccacugcgucaaaaccugccccgccggcgucaugggugaaaauaauacacucgucuggaaauacgccgacgccggccacguaugccaucuuugccacccaaacugcaccuacggcuguaccggcccuggacucgaaggcugccccaccaacggaccaaaaaucccguccauugcaaccggaaugguaggcgcccuacuccuacuacucguaguagcccuagguaucggaccucuccacggucgauga

SEQ ID NO: 4179 - RNA, 3276 nt, Artificial Sequence
  AAH94761 variant
augcgacccucgggcaccgcaggagcggccuuacucgcacuacuggcagcacucugccccgccagccgagccuuagaagagaagaaaguaugccaaggcacauccaacaaacuaacccaacuaggcaccuucgaagaccacuuucugucccuacaaaggauguucaacaacugugaagugguccuaggcaaccucgaaauaacauacguccaacgcaacuacgaccucuccuuccuuaaaaccauccaagaagucgccggcuacguacucaucgcacuaaacacggucgaaaggaucccgcuggaaaaucuacagaucauccgcgguaacauguacuacgaaaauucauacgcccuagccguacuaucgaacuacgacgcaaacaaaaccggucuuaaagaacuaccaaugcgaaacuugcagggccaaaaaugugacccuagcugcccuaacggcagcugcuggggcgccggugaagagaacugccagaaacuaacuaaaaucaucugcgcccagcaauguuccggccgaugccgaggaaagucacccagcgauugcugccacaaccagugcgccgcuggaugcaccgguccaagggaauccgacugccucgugugcagaaaguuccgcgacgaggcaacauguaaagacaccugucccccgcuaaugcucuauaacccaaccacguaccaaauggacguaaacccagaggggaaguacagcuucggagcuacgugcgucaagaaaugcccgcggaacuacgucguaaccgaccauggcucgugcguacgcgcaugcggcgcggacagcuacgaaauggaagaagacggcguucgaaaaugcaagaaaugcgagggcccgugccggaaaguaugcaacggcauuggcauaggcgaauuuaaagacucacugucgauaaacgccacuaacaucaaacacuucaaaaauugcacuuccauauccggcgaccuccauauucuccccguggcuuuccgcggcgacagcuucacgcauacaccaccccucgauccccaagaacucgacauucuaaaaaccguaaaagaaaucacuggcuuucuccuaauccaggcuuggcccgaaaaccgaacagaccuacacgcuuuugagaaccuagaaauaauacguggccgcacuaaacaacauggccaauucucacuagccguggucucguugaacauuaccagccucggccucaggucccuaaaagaaaucuccgacggcgauguuauaauauccggcaacaagaaccucugcuacgccaauaccaucaauuggaagaaauuauuuggcaccaguggccagaaaaccaagauaaucuccaaccgaggagaaaacucaugcaaagccaccggucaaguaugccacgcacucugcagcccagaaggcugcuggggacccgagccccgagauugcguuuccugccgcaacgucagccgcggccgagaaugcgucgacaaaugcaaccuccucgagggcgaaccgcgcgaguucguagaaaacagcgagugcauacaaugucaccccgaaugccuuccccaagcaaugaacaucacuuguaccggcaggggacccgacaacugcauacaaugcgcccacuacauagacggaccucacugcguaaaaaccugcccagccggagucaugggcgaaaacaacacccugguauggaaauaugccgaugccggccacgugugccaccucugccaccccaacuguacuuacggauguacaggccccggucuagagggguguccuaccaacggccccaagaucccaagcauagcaaccggaauggucggggcccugcuacuccuccuaguagucgcccuaggcauaggccuauucaugcgccgaagacacaucguccgcaaacguacgcuccgccguuuacugcaagaacgagaacucgucgagccccugacccccuccggagaagcaccgaaccaagcacuacugcguauccuuaaggaaaccgaauuuaaaaagaucaaagucuuaggcucaggggcauucggaacaguauacaaaggauuauggaucccagagggagaaaaagucaaaauacccgucgccaucaaagaacuacgggaagcaaccagccccaaagccaacaaagagauacuagacgaagcauacguaauggccuccguugacaacccgcacguuugccgccuacuaggaauaugccuaacgucaacaguucaacucauaacacagcugaugccuuucggaugccuccucgacuacguacgugaacacaaggacaacaucggaucacaauaccuacucaacugguguguccaaaucgcgaaaggaaugaacuaucuugaagaccgacgacucguccacagagacuuagccgcacgcaacguccuaguaaaaacgccccaacacguaaaaauaaccgauuucggccuugcaaagcuccuaggcgccgaagaaaaggaauaccacgcagaaggcggaaaagugcccaucaaauggauggcacuagaauccauccuacaccgcaucuacacccaccaaagugacgucugguccuacggagucacggucugggaacuuaugaccuucggaucuaagccauacgacgggauaccagccucagaaauaagcucaauacuggaaaaaggcgaaagacucccccaaccucccauaugcacaaucgacgucuacaugaucaugguuaaaugcuggaugaucgacgccgacuccaggcccaaauuucgcgaacuaauuauagaguucaguaaaauggcacgagacccacagcgcuaccuagucauccaaggcgacgaaaggaugcaccuaccgucaccaacugacucaaacuucuaccgcgcccucauggacgaagaagacauggacgacgucguugacgcggaugaauaccucauuccccaacaagguuucuucucaucucccuccacaucacgcacuccccuccucuccagccuaagcgccaccucuaacaacuccacaguagcaugcaucgaccgaaauggacuacaaagcugccccaucaaagaagacuccuuccuacaacgauacucauccgaucccaccggagcucuaacggaggacagcauagacgacacauuuuuaccaguacccggagaauggcucgucuggaaacaaagcugcuccuccacaucauccacgcacuccgccgccgcuucacuacaaugccccagccaaguccuucccccggcaucgccagaaggggaaaccgucgccgaccugcaaacccaauga

SEQ ID NO: 4180 - RNA, 216 nt, Artificial Sequence
  CAA34902 variant
augcgcccgagcgggaccgcgggcgcggccuugcucgcgcucuuggccgcgcucugucccgcgagcagggccuuggaagagaaaaagggcaagggcgugagcaggcgcuugcccaggcgcccgcgcauagccccgcgcacgccccagcccgcgcaaccgcgcacgggcgcgcccgcgcgcgcgcgcgcgcccgcgcgcccguucuuguucccguga

SEQ ID NO: 4181 - RNA, 720 nt, Artificial Sequence
  AAH10992 variant
augccacuaggccacaucaugcgccuagaccuagaaaaaaucgcgcucgaauacauaguaccaugccuacacgaagucggcuucugcuaccuggacaacuuccuaggagaagucgucggugacugcguacuagaacgcguaaaacaacuccacugcaccggcgcacuccgagacggacaacuagccggacccagagccggagucuccaaacgccaccuacgcggagaccaaaucacauggauaggcggcaacgaagaagggugcgaagccaucagcuuccuccuaagccuaaucgaccgccugguccuguacugcggcucccgccuaggcaaauacuacgucaaagaacgaagcaaagccauggucgcaugcuaccccggaaacggaaccggauacguacgccacgucgacaaccccaacggagacggacgcugcaucacaugcauauacuaccucaacaaaaacugggacgccaaacuccacggcggaauccuacgcaucuucccagaaggcaaaucauucaucgccgacgucgaacccauauucgacagacuccuauucuucuggagcgaccgcagaaacccccacgagguccaacccucauacgcaaccagauacgcaaugacagucugguacuucgacgcagaagaacgcgcagaagcgaaaaaaaaauuccgcaaccucacccgcaaaaccgaauccgcacuaacagaagacuaa

SEQ ID NO: 4182 - RNA, 1566 nt, Artificial Sequence
  BAH13456 variant
auggccaccagucuccacgaaggacccacaaaccaacuggaccugcucauccgugcugucgaagccuccguccacagcuccaacgcacacugcaccgauaaaacaaucgaagccgccgaagcacuccuacacauggaaucuccaaccugccugagagacuccagauccccagaauuuauacacgcagccaugcgacccgacgucauaaccgaaaccguugucgaaguaucaacagaggaauccgaacccauggauaccagcccaauaccuaccucaccagacucccacgaaccaaugaagaaaaagaaagucggccgcaaacccaaaacccaacaaucacccaucucuaacggcucgcccgaacuaggaauaaagaagaaaccacgcgaaggcaaaggaaacacaacauaccucugggaguuccuccuugaccuccuccaagacaaaaacacaugcccacguuacauaaaauggacccaacgagaaaaaggcaucuucaaacucgucgauuccaaagccgucuccaaacuauggggaaaacacaaaaacaaacccgacaugaacuacgaaaccaugggacgcgcccuccgauacuacuaccaaagagggauacuagcaaaagucgaaggccaacggcucgucuaccaauucaaagacaugcccaaaaacaucgucgucaucgacgacgacaaauccgaaaccugcaacgaagaccuggccggcaccaccgacgaaaaaucccucgaacgcguaagccuuuccgcagaaucgcuacuaaaagcggccagcuccguccgauccgguaaaaacuccagucccaucaacugcucccgcgcagaaaaaggaguugcccgcgucgucaacaucacaucccccggacacgacgccucaucacgcagccccaccacuacagccuccgucuccgcgacagcagcccccagaacaguccgagucgcuaugcaaguccccgucgucaugacuucccucggacagaaaauauccacagucgccguacaaucagucaacgcuggcgccccacucauaacaagcacauccccgaccacagccaccuccccaaaagucgucauucaaaccauccccacaguaaugcccgccucaacugaaaacggugacaaaaucacaaugcagcccgcaaaaauaaucaccaucccggccacucaacucgcccagugccaacuccaaaccaaauccaaccucacaggauccggcucuauuaacaucgucggcacaccccuagccguccgcgcccugaccccaguaaguaucgcccacggcacaccaguaaugcgccucucuaugccaacccaacaagccuccggccaaaccccaccccgagucaucuccgcaguaaucaaaggccccgaagucaaauccgaagcugucgccaaaaagcaagaacacgacguaaaaacccuccaacuugucgaagaaaagcccgccgacggcaacaaaaccgucacucacgucgucgucgucuccgcccccucagccaucgcccuuccagucaccaugaaaaccgaaggccugguaaccugcgaaaaguaa

SEQ ID NO: 4183 - RNA, 810 nt, Artificial Sequence
  BAC67168 variant
auggccgccgcccucuucguccuccucggauucgcccuucuaggcacccacggcgcaucaggagcggccggcaccgucuucaccaccguagaagaccuaggcuccaaaauccuacucaccugcucccucaacgacucagccacagaaguaaccggacacagauggcucaaaggaggcguaguccucaaagaagacgcccuccccggacaaaaaaccgaauucaaagucgacuccgacgaccaauggggcgaauacucaugcguuuuccuaccagaacccaugggcaccgccaacauccaacuccacggcccccccagagucaaagcagucaaauccagcgaacacauaaacgaaggcgaaaccgccaugcugguaugcaaaucagaaucagucccacccguaaccgacugggcaugguacaaaaucaccgacagcgaagacaaagcccucaugaacggcuccgaaucgcgauucuucgucucaucaagccaaggacgcagcgaacuccacaucgaaaaccucaacauggaagcagaccccggccaauaccgcugcaacggcaccuccucaaaaggcagcgaccaagcaaucaucacccuccgcguccgcucacaccucgccgcccucuggcccuuccuaggcaucguagccgaaguccucguccuagucaccauaauauucaucuacgaaaaacgacgcaaacccgaagacguccuagacgacgacgacgccggcucugccccacucaaaagcuccggccaacaccaaaacgacaaaggcaaaaacguccgacaacgcaacuccagcuag

SEQ ID NO: 4184 - RNA, 945 nt, Artificial Sequence
  AAA35723 variant
auggccccaccccaaguccucgccuucggacuacuccuggcagccgccaccgccaccuucgccgccgcccaagaagaaugcguaugcgagaacuacaaacucgcagucaacugcuucgucaacaacaaccgccaaugccaaugcaccuccgucggagcgcaaaacaccgucaucugcagcaaacucgcagccaaaugccuagucaugaaagcagaaaugaacggcagcaaacucggccgccgcgccaaacccgaaggcgcacuacaaaacaacgacggccucuacgaccccgacugcgacgaaucaggccucuucaaagccaaacaaugcaacggcaccuccaugugcuggugcgucaacacagccggcgucaggcgaaccgacaaggacacagaaauaacaugcagcgaacgcguacgcacauacuggaucaucaucgaacuaaaacacaaggcccgcgaaaaacccuacgacuccaaaucccuacgcaccgcccuccaaaaagaaaucacaaccagguaccaacucgaccccaaauucauaaccagcauacuauaugaaaacaacguaaucacaaucgaccucguacaaaacuccucccagaaaacucaaaacgacgucgacaucgcagacguagccuacuacuucgaaaaagacguaaaaggagaaucccucuuucacagcaagaaaauggaccuaaccgucaacggcgaacaacucgaccucgaccccggacaaacccuaaucuacuacgucgacgaaaaagccccggaguucagcaugcaaggccucaaagccggagucaucgcgguaauagucguagucgucaucgccguagucgccggaaucgucguacuugucaucucacguaagaaacgaauggccaaauacgaaaaagccgaaaucaaggaaaugggcgaaaugcaccgcgaacucaacgccuaa

SEQ ID NO: 4185 - RNA, 2931 nt, Artificial Sequence
  CCDS169.1 variant
auggaacuucaagcggcccgagccuguuucgcccuccuauggggcugcgcccucgcggcugcggccgccgcccaaggaaaagagguaguucuacuagacuucgcggcagcgggcggggaacugggauggcucacucacccguacgggaaaggcugggaucucaugcaaaacaucaugaacgauaugcccaucuacauguacuccguaugcaacgucaugagcggagaccaggauaacuggcuacgcacgaacugggucuaccgcggggaagccgaacgcaucuucauagaacucaaguucacaguacgcgacugcaacuccuucccaggaggggccuccagcugcaaagaaaccuucaaccuguacuacgccgagagcgaccuggacuacgggacaaacuuccagaaaagacuauucacgaaaauagauacaauagcuccagacgaaaucaccgucucgagcgacuucgaggcacgccacgugaaauuaaacguagaggagcgcucuguaggcccacuaacccgaaagggguucuaccuagcguuccaggacauaggcgcgugcguugcauugcuaucggucaggguauacuacaagaaaugcccagagcugcuccaaggacucgcgcacuuccccgaaaccaucgccggcuccgacgcccccagucuugccacagucgcggggaccugcguggaccacgccgugguaccuccaggcggcgaggaaccccgcaugcacugcgcaguagacggugaauggcucguucccauaggacagugcuuaugccaagcaggauacgaaaaaguggaagacgcuugccaagcgugcucccccggguucuucaaauucgaagcgagcgaaagccccugucuggaaugcccggagcacacucuccccucgcccgaaggggccacauccugugagugcgaagaaggauucuucagagcaccccaagacccagccagcaugcccugcaccagaccaccaucggcgccccauuaccuaacagcugucggaaugggagcuaaaguagaacuaagauggacacccccacaagacagcggcgggcgagaagacaucguauauucaguaacaugcgagcaauguuggccggaauccggagaaugcggaccgugugaagcaagcguaagauacagcgaaccaccccacggacucacacgcacgagcgugacagugagcgaccucgaaccccacaugaacuacaccuucacaguagaagcuagaaacggggugucaggacucguaacuagccguagcuucagaacggccucugucagcauaaaccaaacagaacccccaaaagucagacucgagggacgaucaaccaccagccuaucggucaguugguccaucccgcccccgcaacagagccgaguuuggaaauacgaagucacuuaccgcaagaaaggagacuccaauagcuacaacguacgaagaacagaaggcuucucggucacccuagacgaccuggcuccggacacuacauacuuagugcaaguccaggcacucacccaagaaggucaaggcgcggguagcaaaguacacgaguuccaaacccugagcccagaaggcuccggaaaccuggccgucauaggaggcguagccgucggcgucguacuacuacucguccucgcuggggucggauucuuuauccaccgacgccgcaaaaaucaacgcgcgcgccaaagcccggaagacgucuacuuuaguaaauccgaacaacucaaaccccuaaaaacguacgucgacccccacacauacgaagaccccaaccaagccguacucaaauuuaccacagaaauccaucccagcugcgugacacggcaaaaaguaauaggcgcaggagaguucggcgaagucuacaaaggcaugcuaaagacauccuccggcaagaaagaaguccccguggccauaaaaacacucaaggcgggcuacacagaaaaacaaagaguagacuuccugggagaagccgguaucaugggacaauucucccaccacaauaucauccgacuggaaggcgugaucagcaaauauaagccaaugaugaucauaaccgaauacauggaaaacggugcacuagacaaauuccuccgagaaaaagacggagaguucuccguacuccagcuaguagggaugcucagagguauagcugcaggcaugaaguaccuagcaaauaugaacuauguacaccgcgaccuagcggcaaggaacauacucgucaacuccaaccucgucuguaaagucagcgacuucggacucucacgagugcucgaagacgacccggaagcaacauacacgaccucagguggcaaaauacccauaagauggacagccccagaagcaaucagcuaccgaaaauucaccagcgcaagcgacgucuggagcuucggaaucgucaugugggaaguaaugacauacggcgaacgaccguacugggaacuuagcaaccacgaaguaaugaaagcaauaaacgacggauuccgccucccgacaccgauggacuguccaagcgcaaucuaucaacuuaugaugcaaugcuggcaacaagaacgagcacgucgucccaaauucgcagacauagucucgauacucgacaaacugauacgggcccccgacucacugaaaaccuuagcagacuuugacccacgugugagcaucagauuaccaucgaccuccggcucggaagggguacccuucaggaccguaagugaauggcuggaaucuauaaaaaugcaacaauacacagaacacuucauggcagccggcuacacggcaauagaaaaagucgugcaaaugaccaaugaugacauuaaacgaauuggcgugcgauuaccaggccaccaaaagagaauugcguacucacuauuggggcugaaagaccaaguaaauacagucggcaucccuauauaa

SEQ ID NO: 4186 - RNA, 2952 nt, Artificial Sequence
  AAG43576 variant
auggacugccagcugagcaucuuacugcugcucuccugcucggugcuggacuccuucggcgagcugaucccccaaccgagcaacgaggucaaccugcuggacuccaagaccauccagggggaacugggguggaucucauaccccucccacggaugggaggaaaucagcggcguggaugagcacuacacccccauacgcacguaccaggugugcaacgucauggaccacucccagaacaacuggcugcggaccaacugggugccccgcaacagcgcccagaaaaucuacguggagcuaaaauucacccugagagacuguaacagcaucccucucgucuuggggaccugcaaggagacauucaaccuguacuacauggagagcgacgacgaccauggcgugaaguuccgcgagcaccaguucaccaagaucgacaccaucgcagcggacgagucguucacccagauggaccucggcgaccggaucuugaagcugaacacggagauccgcgaggugggccccgucaacaagaagggcuucuaccucgccuuccaggacgugggugccugcguggcccuggucucaguacggguguacuucaagaaaugccccuucaccgucaaaaaccuggcaauguuucccgacacagugccgauggacucccagucccuaguggaaguccgcggcuccugcgugaacaacagcaaggaggaggacccuccccggauguacugcuccaccgagggagaguggcuggugcccaucgguaagugcagcugcaacgcuggcuacgaggagcgcggguucaugugucaggccugccggcccggcuucuacaaggcccuggaugggaauaugaagugcgccaagugcccgccccacagcuccacgcaggaggauggcagcaugaacugccgcugcgagaacaacuacuuccgggcugacaaggacccgcccuccauggccuguacccgcccgcccagcagcccccggaacgucaucucuaacauaaacgagacauccgugauauuagacugguccuggccccuggacaccggcgggcgcaaagacguaaccuuuaacaucaucugcaagaagugcggcuggaacaucaagcagugcgagcccugcucccccaacguccgguucuugccacgccaauucgggcucaccaauaccaccgugacggugaccgaccugcuggcccacaccaacuacaccuuugagaucgacgccgugaacggcgugagcgagcucuccagcccgccaagacaauucgccgcggucucuaucacgaccaaccaggccgcccccagccccguacucaccaucaagaaggaccgcaccucccggaacagcaucucccugagcuggcaggagcccgagcaccccaacgggaucauccuagauuacgaggucaaguacuaugagaagcaggagcaagagacguccuacaccauccugcgggcccgcggcaccaaugucacuaucagcagccugaagcccgacacgaucuacguguuccagauccgggcccgcaccgcggccggcuacggaaccaacucccggaaguucgaguucgagaccagcccggacuccuucagcaucuccggcgaaagcucccagguggucaugaucgccaucucggccgccgucgccaucaucuugcugacuguggucaucuacguacucaucggucgcuucuguggcuacaagaguaagcacggggccgacgagaagcggcuccacuucggcaacggccaccugaagcuccccgggcuccgcacuuacguugacccccacaccuacgaggaccccacccaggccguccacgaguucgcgaaggagcuggacgccaccaacaucagcaucgacaaaguggugggcgcgggggaguucggcgaggucugcuccgggagacucaaacucccgagcaagaaggagaucuccguggccaucaagacgcugaaggugggcuacaccgagaagcaacgcagggacuuccugggcgaggcaagcauaauggggcaguucgaucacccaaacaucauccgccucgagggcgucgucaccaagucuaaaccgguuaugaucgucaccgaguacauggagaacgggagccuggacuccuuccugcgaaagcacgaugcccaguuuacggugauccagcuaguggguaugcuccgcggcaucgcuagcgggaugaaguaccugagcgauaugggcuacguucaucgggaccuggccgcccgcaauauccucaucaacuccaaucuagugugcaagguuagcgacuucggacugagccggguccucgaggacgaccccgaggccgccuacaccaccaggggagggaagaucccgaucagauggaccagccccgaggcgaucgcauaccgcaaguucacuuccgccagcgacgugugguccuacggcaucgugcugugggaggucaugagcuacggcgaacggcccuacugggagauguccaaccaggauguaauuaaagccguggacgagggguaccgcuuacccccgcccauggacugccccgccgcgcucuaucaacugaugcuggacugcuggcagaaggaccgaaacaaucggcccaaguucgagcagaucgucagcauccuagacaagcugauccgcaacccgggcucccugaagaucaucaccucggccgccgcccggccuagcaaccuccugcuggaccagagcaacguggacaucaccaccuuccgcacgaccggggacuggcuuaacggcguguggaccgcccacugcaaggagaucuucaccggggucgaguacagcagcugcgacacuaucgcgaaaaucuccaccgacgacaugaaaaaggugggugugacugucgugggcccccaaaagaagaucaucagcuccaucaaggcuuuagagacgcagagcaagaacgggcccguuccggucuga

SEQ ID NO: 4187 - RNA, 2952 nt, Artificial Sequence
  AAH63282 variant
auggacugccaacucagcauacuccuccuccucuccugcuccguccucgacuccuucggcgaacuuauaccccagccaagcaacgaagucaaccuccucgacagcaaaaccauacaaggagaacuaggauggaucagcuaccccagccacgguugggaggaaaucucagggguugacgaacacuacaccccaauuagaaccuaucaagucugcaacguaauggaccacagccagaacaauuggcuccgcaccaacuggguuccaaggaacagcgcucagaaaaucuauguagaacugaaauucacauuaagagacugcaacuccaucccccucguacuaggaacgugcaaggaaacauucaaccucuacuacauggaaagcgacgacgaccacggcgugaaauuccgcgagcaccaauucacgaaaauagacacaauagcagccgacgagagcuucacccaaauggaccuaggcgaccgaauacugaaacuaaacacagaaauccgugaagucgggcccgucaacaagaagggcuucuaccuugcauuccaagauguaggagccugcguagcccuagucuccguccgaguguacuucaaaaagugcccauucaccgucaaaaaccuagccauguuucccgacaccguccccauggacucucaaucccucguagaaguucgcggcuccugcguuaauaauuccaaagaagaagacccaccacgcauguacugcuccacugaaggcgaguggcucguacccauagguaagugcuccugcaacgcuggauacgaggaaagaggcuucaugugccaagccugcagaccgggcuucuacaaagcacucgacggaaacaugaagugcgccaaaugucccccacacucaucuacacaagaagacggcuccaugaacugccgcugcgagaacaacuacuuccgcgccgacaaggauccacccucaauggccugcacccgacccccaucgucccccagaaacgucaucuccaacauaaacgagaccagugugauccucgacuggagcuggccauuagacacagggggcagaaaagacgugacauuuaacaucauaugcaagaaaugcggguggaauaucaaacaaugcgaacccugcagccccaacguccgcuuccugcccagacaauuugguuuaaccaacaccaccgucaccgucaccgacuuacucgcacacacgaacuauaccuucgaaauugacgcagucaacgguguaagcgagcuaagcuccccaccccggcaauucgcagcagucucaaucaccaccaaccaggcagcacccucaccaguccucacaaucaaaaaggaucgcacaucccgcaacagcauaucccucucguggcaagagcccgaacaccccaacgguauaauacuagacuacgaagucaaguacuacgaaaaacaagaacaagaaacuucauauacaauccuccgugcacguggaaccaacgucaccaucuccucccuaaaacccgacaccaucuacgucuuccagauacgcgcacgcacagccgcaggauacggcacaaacuccagaaaauucgaguucgaaaccucaccagacucauucagcauauccggggaaucaagccaagucgucaugauagccaucucagccgcaguagccaucauauuacuaacagucgucauauacguccuaauagggcgcuucugcgguuacaaguccaaacacggggcagacgaaaaacgccugcacuucggcaacggccaccucaagcucccgggccuccgcacauaugucgacccccacaccuacgaggaccccacucaaacgguacacgaauuugcuaaagaauuagacgccacaaauauaucgaucgacaaagucguaggcgcgggcgaguuuggagaaguaugcagcggccgccuaaaacuaccaucaaagaaagagaucaguguggcgauaaaaacgcucaaaguaggcuacaccgaaaaacagcgacgagacuuccuaggagaagccagcaucauggggcaauucgaccacccgaacaucauccgauuagagggcguggucacgaaguccaaacccguaaugaucgucacagaauacauggaaaacgggagccuagauuccuuccuccggaaacacgacgcccaauucacaguaauacaacucguaggcaugcuacgcggcaucgccucagggaugaaguacuuaagcgacaugggauacguccacagagaccucgcugcacgaaauauauuaaucaauagcaaccuaguuugcaaagucuccgacuucggacucagccgaguccuagaagacgauccggaagcagccuacaccacacgcggcggcaaaauaccgauacgauggaccagccccgaggcaauagccuaccgcaaauucaccucagccuccgauguauggagcuacggcauaguccucugggaggucaugaguuacggagaacgaccauacugggaaaugucaaaccaggacguaaucaaggcgguagacgaaggauacagauuacccccacccauggacugcccagcagcacucuaucaacuaaugcuagacugcuggcaaaaagaccgaaacaaccguccaaaauucgaacaaaucgucaguauacucgacaaacucauccgcaaccccggaagucugaaaauaaucaccagcgcggccgccaggccaucgaaccuccucuuagaccaaucaaacgucgauauaacgacauuccggaccacaggggauuggcucaacggagucuggacagcacacugcaaagagaucuucaccggagucgaguacagcucaugcgacacaauagcaaaaauaucgacagacgacaugaagaaagucggugucacaguagucggcccccaaaagaaaauaaucucauccaucaaagcacucgaaacccaauccaaaaauggcccuguaccagucuaa

SEQ ID NO: 4188 - RNA, 1389 nt, Artificial Sequence
  BAG54127 variant
augccgauguccaccauccuaccugucacuucccccugccucccagccacaggcgucacuguaugggaacucaugaccuucggcgcagaaccauacgccggccucagacucgcagaaguccccgaccuucuagaaaaaggugaaagacucgcccaaccacaaaucugcacaauagacgucuauauggucauggucaaaugcuggaugaucgacgaaaacauccggccaacauucaaagaacuagcaaacgaauucacccgcauggcacgagacccaccccgcuaccucgucauaaaaagagaaucaggcccaggaaucgcccccggacccgaaccccacggcuuaaccaacaaaaaacucgaagaagucgaacuagaaccagaacucgaccucgaccucgaccucgaggcagaagaagacaaccucgccaccaccacccuaggaagcgcacuaucccucccaguaggcacacuuaaccgcccgcgcggcucacagucacuccucucucccagcuccggauacaugcccaugaaccaagguaaccucggagaaagcugccaagaauccgccgucucuggcagcucugaacgcugcccccgcccagucucccuccaccccaugccacgaggaugccucgcuuccgaauccucugaaggccacguaaccggaucagaagcugaacuacaagaaaaagucagcaugugccgcucacgcagccgaucccgauccccacgcccaagaggcgacucugccuaccacucccaacgacacucccuacucacuccaguaacaccccucuccccccccggccuagaagaagaagacgucaacggcuacguaaugccagacacccaccuaaaaggcaccccauccucccgcgaaggaacccucucaagcgucggauuaucauccguccuaggcaccgaagaggaagacgaagaugaagaauacgaauacaugaaccgcagaagacgacacucucccccccaccccccccgccccucaucccucgaagaacucggcuacgaauacauggacgucggaucagaccuuuccgccucccucggcuccacccaaucaugcccccuccacccaguacccaucaugccaaccgccggaacaaccccugacgaagacuacgaguauaugaacagacaaagagacggcggaggaccaggaggcgacuaugcagccaugggcgccugccccgccuccgaacaggguuacgaagaaaugcgcgccuuccaagggcccggccaccaagccccccacguccacuacgcacgacucaaaacccuccgcucacuagaagcaacagauuccgcauucgacaauccggacuacuggcacucccgacucuuccccaaagcaaacgcacaacgcaccuaa

SEQ ID NO: 4189 - RNA, 2766 nt, Artificial Sequence
  BAG57868 variant
augcgcgcaaaugacgcccuucaaguccucggccuacuauuuagucucgcaaggggcucggaagucggcaacagccaagccgucugcccgggcacccucaacggacuauccgucacaggggacgccgaaaaccaauaccaaacucuauacaaauuauacgaacguugcgaagucgugaugggcaaccuagaaaucgugcuaacaggccacaacgccgaccucucauuccugcaguggauccgggaaguaaccggauacguacucgucgccaugaacgaauuuucaacccuaccacuacccaaccuucgcgucguacguggcacccaagucuacgacggcaaauucgccauauucguaaugcucaacuacaacacaaacagcucacacgcccuucgccaacuccgacucacccaacuuaccgaaauccucuccgguggcguauacauagagaaaaaugauaaacucugccacauggacaccauagacuggcgcgacauaguccgcgaccgagacgccgaaaucgucgugaaagacaacggccgaucgugucccccaugccacgaagucugcaaaggcagaugcuggggaccaggcucagaagacugccaaacccuaacgaaaaccaucugcgcuccccaaugcaacggacacugcuucggccccaacccgaaccaaugcugccacgacgaaugcgccggcgggugcucuggcccccaagacacugacuguuucgcgugucgccacuucaaugacucuggcgccugcgucccacgaugcccucaaccgcuaguauacaacaaacuuacguuccaacuggagcccaacccgcacaccaaguaccaauacggaggaguaugcguagccuccugcccgcacaacuucguggucgaccaaaccaguugcguccgugccugcccacccgacaagauggaggucgacaaaaacgggcucaaaaugugcgagcccugcggcggucucugccccaaagccugcgaaggaacaggauccggcucccgauuccaaacuguagacucauccaacauagacggcuucguuaauugcacaaagauacucggaaaccucgacuuccuaaucaccggacuaaacggggaccccuggcacaaaauacccgcacucgaccccgaaaaacuaaacgucuuccgaaccguccgcgaaaucacaggauaccucaacauacaaucauggccaccccacaugcacaauuucuccgucuucagcaaccucaccaccaucgguggccgaagccuguacaaccgaggauuuucacuccucauaaugaaaaaccucaaugucacaucccuugguuuccguucccucaaagaaauaagcgccggucgcaucuacauaucugcaaaccgccaguugugcuaccaccacagucucaacuggacaaaaguacucagaggccccaccgaggagcgacuagacauaaaacacaaccgcccccgccgagacugcguugccgaaggcaagguaugcgacccccucugcucaagugguggcugcuggggcccuggacccgggcaaugccuguccugucgaaacuauucccggggcggggucugcguaacccacuguaauuuccuuaacggcgaaccaagggaauuugcacacgaggcugaaugcuucucgugccaccccgaaugccaacccauggaaggaaccgcuacauguaauggcuccggcucggacaccugugcacaaugcgcgcacuuccgagacgggccccacugcguauccuccuguccacacggcguacuuggcgccaaaggcccaaucuacaaauaucccgacguccagaaugagugcagaccaugccacgaaaacugcacacagggcuguaaaggccccgaacuacaagacugccuaggacaaacccucguguugaucggcaaaacacaucuaaccauggcccuuaccgugaucgccggacucgucgucaucuucaugaugcuaggcggcaccuuuuuauacuggagaggucgcagaauacaaaacaaacgagcaaugcgacgauaccucgaacgaggagaauccaucgaaccacuagaccccuccgaaaaggccaacaaaguccucgcccgcauauucaaagaaaccgaacuccgaaaacugaaaguccucggaagcggcguauucggcaccguucacaaaggcguauggauacccgaaggcgaaagcauaaagaucccagucugcaucaaaguaaucgaagacaaauccggacgacaaucauuccaagcaguaacagaccacaugcucgccaucggcucccuagaccacgcccacauaguccgccuacuaggacuaugcccaggaucaucccuacaacucgugacgcaauaccucccacuugguucgcuccucgaccacguccgccaacaccgcggagcccuugggccacagcugcuccucaacuggggcguucaaaucgccaaaggcauguacuaccuagaagaacacggaaugguccaccgaaaccucgccgcccgaaacguccuccuaaaaucccccucccaaguccaggucgccgauuucggcguugccgaccuacuuccucccgacgauaaacagcuccuuuacucagaggccaaaacccccauuaaauggauggcacuagaaagcauccacuucggcaaauacacccaccaauccgacguaugguccuacggccaaugcaucuggaugcccucccucccaagccuugccccaguaucaaaccuccccuucgaaacgcccagcuag

SEQ ID NO: 4190 - RNA, 3927 nt, Artificial Sequence
  AAB59446 variant
augaagcccgcuacgggacucugggucuggguaucucuccuaguggccgcggguaccguccaacccagcgacucccagucaguaugcgcuggcacagaaaacaagcuaagcucacuaucggaccuggaacaacaguaccgugcauuaagaaaauacuaugaaaacugcgaaguuguaaugggaaaccucgagauaacuuccaucgaacacaaccgugaucucuccuuccuaagaagcguacgagaagucaccggcuacgucuuagucgcacuaaaccaauucagauaccuaccacuagaaaaccuaagaauaauccgaggcaccaaacucuacgaagaccgcuacgcacuggcuauauuccucaacuaccgcaaagacggcaacuuuggacuucaagaacucggccuuaaaaaccugaccgagaucuugaacggcggcgucuacgucgaucaaaacaaauuccucugcuacgccgacacaauucauuggcaagauaucgugcgcaacccuuggcccuccaaucuaacucuugucuccaccaauggauccucaggcugcgggcgcugccacaaaagcuguaccggccgcugcuggggaccuaccgaaaaccauugccaaacccucacgcgaacuguuugcgcagaacagugcgacggaagaugcuacggcccuuacguaucugacugcugucaccgagaaugugccggaggcuguucagguccgaaagacaccgacuguuuugccugcaugaacuucaacgacuccggcgccugcguaacccagugcccacagaccuuuguauacaacccgacaaccuuucaacucgagcauaauuucaaugccaaauacacauacggagcauucugcgucaagaaaugcccacacaacuuuguagucgacagcaguuccuguguccgcgccugucccucauccaaaauggagguagaggaaaacgggaucaaaauguguaaacccugcacagacauaugccccaaagcaugcgauggcaucggaacaggcucccucaugucagcacaaaccguagacagcuccaacauagacaaauuuauuaauugcacuaaaauuaacgguaacuuaauauuccucguuaccggaauccauggggauccguacaacgcgauagaggcaauagaucccgaaaagcucaacgucuuccgcacuguccgcgagaucaccggcuuuuuaaacauucaauccuggcccccuaacaugacugacuucagcguguucaguaaccucguaaccaucggaggacgcgugcuauacucaggccuaucgcuccucauacucaaacaacaaggcauuacaucccuccaauuccaaucgcuaaaagaaauuucagcgggcaauauauacaucaccgauaauuccaaccucugcuauuaccacacuaucaacuggaccacacucuucucaacaauaaaccaacgaaucguaauccgcgacaaccggaaagccgaaaacugcacagcggaaggcaugguaugcaaccaccucugcagcagugauggcugcuggggaccggguccugaccagugccuauccugcagacgauucucacgcggccgcauaugcauagagucgugcaaucuuuacgacggcgaguuccgagaguucgaaaacggaagcaucugcgucgaaugcgacccccaaugcgaaaagauggaggacggccuacuaacaugccauggcccgggacccgacaacugcacaaaaugcucacacuucaaagacggccccaacugcguagagaaauguccugacggacuacaaggcgcuaacaguuuuaucuuuaaauacgccgauccagaccgcgaaugccacccaugccacccuaacugcacccaaggcugcaacggcccuacuagccaugacuguauauacuacccauggaccgggcauucgacccuuccccaacacgccagaaccccacucauagccgcuggaguuaucggcggauuguucauccuagucaucgugggccuuacguucgccguuuauguccgccgcaaaucuaucaaaaagaaacgcgcccuccgucgcuuccuagaaacagagcuugucgaaccacucacgccaucgggcaccgcaccaaaccaagcgcaacucagaauccucaaagaaaccgagcucaaacguguaaaaguucuaggcagcggagccuucggcacagucuacaaggguaucugggucccagaaggcgagacugucaaaaucccaguagccaucaaaauacuaaaugaaaccacaggccccaaagcaaacguugaguucauggacgaagcccucaucauggcaucaauggaccacccgcaccuaguccgccuccucggagucugucuuucgccaaccauucagcuagugacccagcucaugccccauggcugucuucucgaauacguccacgaacacaaagauaauaucggaucccaacuacuucuuaauuggugcguacaaauagccaaaggaaugauguaccucgaagaacgacgccucguccaccgcgaucuagcagcccguaacgugcuaguaaagucacccaaccacguaaaaaucaccgacuucgggcucgcacgccuacuugaaggcgacgaaaaagaguauaacgcagacggaggcaaaaugccaaucaaauggauggcgcuagaaugcauccacuaccgaaaguucacccaucaaucagacguuuggucuuacggagucacuaucugggaacuuaugacauucgggggcaagccauacgacggcauucccacccgcgagauucccgaccuccucgaaaaaggcgaacgacuaccccaaccacccauaugcaccaucgacguauacaugguaaugguaaaaugcuggaugaucgacgccgauagccgcccaaaauucaaagaacuagcugcagaguucagccgcauggcccgggauccgcaacgguacuuagugauccagggggacgacagaaugaaacuccccucccccaacgacucaaaauucuuccagaacuuauuggacgaagaagaccucgaagacaugauggaugcggaagaauaccucguaccucaggccuuuaacauacccccaccaauauacacaucccgagcgcguaucgacucaaaucgaucugaaaucggccacucuccaccacccgcuuacacgcccaugagugguaaccaauucguauacagagacgguggauuugccgccgaacagggagucucaguucccuaucgagcccccacaucaaccauuccggaagcucccgucgcccaaggcgccaccgccgaaauauuugaugacagcuguugcaacggaacccuccgcaaaccggucgcaccacacguccaggaagacuccucgacccagcgcuacuccgccgaccccacagucuucgccccggaacgcagcccccgcggcgaacuugacgaagaaggcuacaugaccccuaugcgcgacaagcccaaacaggaauauuuaaaccccguagaagagaaccccuucgucucccgccgcaagaacggagauuuacaagcccuugacaauccagaauaccacaacgccuccaauggaccacccaaagccgaagacgaauacguaaacgaaccccuauaccuuaacaccuucgcaaacacccuaggcaaggccgaguaccucaaaaacaacauacuauccaugcccgagaaagccaagaaggcuuucgacaacccugacuacuggaaucauucccuaccgccccgcaguacccuacaacaccccgacuacuugcaagaauacagcacgaaauacuucuauaaacagaacggacgcauacgaccaauaguagcggaaaaucccgaauaccuguccgaguucucacucaagccagggaccguucuaccaccuccacccuaucgccaccgcaauacugucgucuag

SEQ ID NO: 4191 - RNA, 1461 nt, Artificial Sequence
  CCDS46648.1 variant
augauccaaacaguaccagaccccgccgcccacaucaaagaagcccucuccguagucuccgaagaccaaucacuauucgaaugcgccuacggaacgccccaccucgccaaaaccgaaaugaccgccuccucauccuccgacuacggacaaaccuccaagaugucuccccgagucccucaacaagacuggcuaucccaacccccagcccgagucacuaucaaaauggaaugcaacccuucccaaguuaacggcucccguaacucacccgacgaaugcuccgucgccaaaggcggcaaaauggucggcucccccgacacaguaggaaugaacuacggcucauacauggaagaaaaacacaugcccccuccgaacaugacaacaaacgaacgacgcgucaucguaccagcagaccccacccucugguccaccgaccacguacgacaauggcuugaaugggccguaaaagaauacggccucccagacgucaacauccuacuguuucaaaacaucgacggcaaagaacuuugcaaaaugaccaaagacgacuuccaacgccucaccccgucauacaacgccgacauccuacucucccaccuacacuaccuccgagaaaccccacucccccaccuaaccagcgacgacgucgacaaagcccuacaaaacucuccccgccuaaugcacgcccgcaacaccggaggagcagcauucauauuccccaacaccuccgucuaccccgaagccacccaacgaaucaccacccgccccgaccuccccuacgaaccuccacgccgcucagccuggaccggccacggccaccccacaccccaaagcaaagcagcccaacccucaccauccaccguacccaaaaccgaagaccaacgcccccaacuagacccauaccaaauacucggccccaccucaagccgccucgccaaccccggcuccggccaaauccaacucuggcaauuccuucuggaacuccucucagacucaucaaacucauccugcauaacaugggaaggaaccaacggagaguucaaaaugaccgacccagaugaagucgcccgacgcuggggcgaacguaaauccaaacccaacaugaauuacgacaaacucagccgcgcccuacgauacuacuacgacaaaaacaucaugacaaaaguacacggcaaacgcuacgccuacaaauuugacuuccacggcaucgcucaagcccuacaaccccauccacccgaaucuagccucuacaaauaccccucagaccuccccuacaugggcagcuaccacgcccacccccagaaaaugaacuucgucgcaccccaucccccagcccuaccaguaaccuccuccuccuucuucgccgcccccaaucccuacuggaacucacccacuggaggcaucuacccuaacacccgacuccccacgucacacaugcccucacaccuaggcacuuauuacuaa

SEQ ID NO: 4192 - RNA, 1359 nt, Artificial Sequence
  AAA19786 variant
augucagaaacacccgcacaaugcucaaucaaacaagaacgaaucuccuacaccccacccgaaagccccguccccuccuacgccuccagcacaccccuccacguccccgucccccgcgcccuacgcauggaagaagacucaauccgacuccccgcacaccuccgccuacaacccauauacuggucccgcgacgacgucgcacaauggcucaagugggccgaaaaugaguucucccuccgccccaucgacucaaacaccuucgaaaugaacggcaaagcacuccuccuccucaccaaagaagacuuccgcuaccgcucuccccacuccggcgacguccucuacgaauuacuccaacacauacuuaaacaacgcaaacccagaauccucuucuccccuuucuuccaccccgggaacuccauccauacccaacccgaagucauucuccaccaaaaccacgaagaagacaacuguguacaacgaaccccacgcccuucugucgacaacguccaccacaacccucccaccauagaacuccuccaccgcucccgaucccccaucacaaccaaccaccgccccucacccgacccagaacaacgcccccuccgcucaccccuagacaacaugauacgccgccuuucccccgccgaacgcgcacaaggaccccgaccacaccaggaaaacaaccaccaagaauccuacccacucuccgucucccccauggaaaacaaucacugccccgcauccuccgaaucccaucccaagcccuccucuccccgucaagaauccacacgcgucauccaacucaugcccuccccaaucaugcauccccuuauccucaauccccgacacuccgucgacuucaaacaaucccgacugucugaagacggccuacaucgcgaagguaagccaaucaaucucucccaccgcgaagaccucgccuacaugaaccacauuauggucucagucucaccacccgaagaacacgcaaugcccauaggacgcauagcugacugccgccuccuaugggacuacguuuaccaacuccucuccgacucacgcuacgaaaacuucauacgcugggaagacaaagaauccaaaauuuuccgaaucgucgaccccaacggauuagcccgccucuggggaaaccauaaaaaccgcacaaacaugaccuaugagaaaaugucccgcgcucuccggcacuacuacaagcuaaauaucauacgcaaagaacccggccaacgccuccucuucagauucaugaaaacccccgacgaaaucauguccggucgcaccgaccgccucgaacaccucgaaagccaagaacucgacgaacaaaucuaccaagaagacgaaugcuaa

SEQ ID NO: 4193 - RNA, 1971 nt, Artificial Sequence
  AAH04817 variant
auggcaucaacagacuacagcacauacagccaggcagcggcacaacaaggguacucggccuacacagcacagccaacccaaggcuacgcccaaacaacgcaagcauaugggcaacaaagcuauggaacauacgggcaaccgaccgaugucucauacacacaagcacaaacgaccgcaacauacggccaaacagcguaugcaacaucguacggacagccaccaacaggauacacaacuccaacagccccgcaagcguacucgcaaccaguacaaggauauggaacaggagcauacgacaccacgacagcuacagucacuacgacacaggccucauacgcagcacaaagcgcauacggcacacaacccgcauacccagcauacggccagcaaccggcagcgacagcccccacacgcccacaagacgguaacaaaccaacagaaacaucgcaaccgcaaucaagcacaggcggguacaaucaaccaagucuaggauacggccaaagcaacuacaguuacccacaaguacccggaagcuaucccaugcaaccagucacagcacccccaucguacccgcccacgagcuauagcucaacccagcccacaagcuacgaccaaagcucuuacagccaacaaaacacguacggccaacccagcagcuaugggcaacaaagcucauaugggcaacagagcucauacgggcaacaacccccaacaucauacccaccacaaacagggaguuacagccaggccccaucacaauacagccagcagagcagcagcuauggacaacaaagcucauuccgacaagaccacccaucgagcaugggcguauaugggcaagaaagcggaggauucagcgggccaggggaaaauaggucaaugagcggaccagacaaccguggacgaggacgaggaggauucgacagaggcgggaugagccgcggaggaagaggaggaggcagggguggaaugggaagugccggcgagcgaggaggauucaacaaacccggaggaccaauggaugaagggccagaccuagaccuaggaccaccggucgaccccgaugaagacucagacaacuccgccaucuacguacaggggcuaaacgacagugucacacucgaugaccuggcagacuucuucaaacagugcggaguaguaaaaaugaacaaacgcacuggccaacccaugauccacaucuaucuagacaaggaaacgggaaaaccuaagggagacgccaccgugagcuacgaagacccaccaacggccaaagcagcaguggaaugguucgacggaaaggacuuccaagggagcaaacuaaaaguaucgcuagccagaaagaaaccaccgaugaacucgaugagaggaggacucccgccaagagaaggacggggaaugccuccgccucuaagaggugggccagggggcccaggcggaccagguggccccaugggacgcaugggaggaagaggaggcgacagaggaggauucccgccccgaggaccgcgaggcuccagaggaaacccaagcgggggcgggaacguacaacaccgcgcaggagacuggcagugcccgaacccaggaugcggcaaccaaaacuucgcauggcgaaccgaaugcaaccaauguaaagcaccaaaaccagaaggguuccuaccacccccguucccaccaccaggaggagauagaggaagagguggaccgggagguaugcggggcggcaggggaggacucauggacaggggaggaccaggaggcauguucagaggaggaagaggaggagaucgaggaggauuccgaggaggccgaggcauggacaggggcggguucggaggcggacggcggggcgggcccgggggaccacccggaccccuuauggaacagaugggaggacgcaggggaggaagagggggcccgggaaagauggauaaaggcgagcaccgacaagaaaggagagaccgaccauacuaa

SEQ ID NO: 4194 - RNA, 1998 nt, Artificial Sequence
  AEA07595 variant
augggccaaaccggcaagaaauccgaaaaaggccccguaugcuggcgaaaacggguaaaaagcgaauacaugcgacuacgccagcuuaagcgauuccgacgcgccgacgaaguaaaaagcauguucucaucgaaccgacagaaaauccuagaaagaaccgaaauacuaaaccaagaauggaaacaacgacgcauccagcccguccacauccuaaccagcgugagcucacuccgaggaacccgagaagucgaagacgaaaccguccuacacaacauaccauacaugggagacgaaguccuagaucaagacggcacauucaucgaagaacuaauaaagaacuacgacggcaaaguccacggagacagagaauguggauucauaaacgacgaaaucuucgucgagcuagucaacgcgcucggacaauauaacgacgacgacgacgaugacgacggggacgacccggaagaaagggaagaaaaacaaaaagaccuagaagaccacagggacgacaaagaaucacgaccaccccgcaaauuccccucagauaaaaucuucgaggccauaagcuccauguuccccgacaaaggaacagccgaggaacucaaagaaaaauacaaagaacucacagaacagcaacuccccggagcacucccucccgaaugcacccccaauauagacggccccaacgcaaaaagcguccagcgcgaacaaagccuccacucauuucacacccucuucugccgacgcugcuucaaauacgacugcuuucuacaccccuuccacgcgacacccaacacauacaagcgcaaaaacaccgaaacggcacucgacaauaaaccgugcggaccccagugcuaccaacaccuagaaggcgcaaaagaguucgcggcagcccucacggccgaacgcaucaaaacaccacccaaaagaccuggcggacgccgcagaggccgccuccccaacaacaguucgcgaccgagcacaccaacgaucaacguccuggaaucaaaagacacagacagcgaccgagaagccggcaccgaaacaggaggcgaaaacaacgacaaggaagaagaagaaaagaaagacgaaaccagcucaucaagcgaagcaaacagcagaugccagaccccaaucaaaaugaaaccgaacaucgaacccccagagaacgucgaauggucaggcgccgaagccucuauguuccgaguccucaucgggaccuacuaugauaacuucugugcaauagcacgacucauaggaacaaagacaugucgccaagucuacgaguuccggguaaaggaaagcuccauaaucgcaccggccccggccgaagacguagacacacccccacgaaagaaaaagcgcaagcacagacuaugggcagcccauugccgcaaaauccaacucaagaaagggcaaaaccgcuuccccggcugccgaugcaaagcgcagugcaacaccaaacaauguccaugcuaccuagccguucgcgaaugcgacccggaccuaugccucacaugcggggcagccgaccauugggacagcaagaacguauccugcaaaaacugcuccauccaacgagggagcaagaaacaucugcugcuggcacccucggacguugccggauggggcauuuucauaaaagaccccguccagaaaaacgaguucaucucagaauacugcggcgaaaucauaagccaagacgaagcagaccgacgcggaaaaguguacgacaaauauaugugcagcuuccucuucaaccugaacaacgacuucguagucgacgcgacccgaaaaggaaacaaaauccgcuucgcaaaccacagcguaaacccaaacugcuacgccaaaguaaugauggucaacggcgaucaccgcaucggaaucuucgccaagcgggcaauccaaacuggcgaagaacuauucuucgacuaccgauacagccaagccgacgcccucaaauacguagggauagaacgggaaauggaaauccccuaa

SEQ ID NO: 4195 - RNA, 1005 nt, Artificial Sequence
  EAW80068 variant
augggccagaccggcaaaaaaagcgaaaaaggacccgucugcuggcgcaaacgcgucaaaucagaauacaugagacuacgccaacuaaaacgcuuccgaagagccgacgaagucaaauccauguucucaagcaaccgacaaaaaauccucgaacgaaccgaaauucucaaccaagaauggaaacaacgacgcauccaaccaguccacauccuaaccucggucuccucccuccgcggcacccgcgaaugcuccgucaccucagaccucgacuuccccacccaagugaucccccucaaaacccuaaacgccgucgccuccguccccaucauguacagcugguccccccuccaacaaaacuucauggucgaagacgaaaccguccuacacaacauccccuacaugggagacgaaguccucgaccaagacggcaccuucaucgaagaacugaucaaaaauuacgacgggaaaguacacggagacagagaaugcggcuucaucaacgacgaaaucuucgucgaacucguaaacgcacucggacaauacaacgacgacgacgacgacgacgauggcgacgacccagaagaacgcgaagaaaaacaaaaagaccucgaagaccaccgcgacgacaaagaaucccgcccaccacgcaaauuucccagcgacaaaauauucgaagccaucuccucgauguuccccgacaaaggcaccgcagaagaacucaaagaaaaauacaaagaacucaccgaacaacaacucccaggcgcccucccccccgaaugcacacccaacaucgacggcccaaacgccaaauccguccaacgcgaacaaucccuacacagcuuccacacccucuucugccgacgcugcuucaaauacgacugcuuccuccaccccuuccacgccaccccaaacacauacaaacgcaaaaacacagaaacagcccuggacaacaaacccugcggcccccaaugcuaccaacaccuuccccuccucccacgaaacuaa

SEQ ID NO: 4196 - RNA, 195 nt, Artificial Sequence
  CCO13726 variant
augccccucgucaacaucaugaugaugaccaugaugaugauggaaaccauccucaaaaaagaaaaaaaaucccgcaaaaucuggcgcaucaccgaaaugaucaaaaaagccgcccaccucggcaacuuccuccucaucaaauuccucaaacccuucccccaaugcuuccaaauccgcgcccaacaaaaaaacuaa

SEQ ID NO: 4197 - RNA, 2241 nt, Artificial Sequence
  AAC51520 variant
augggccaaaccggcaaaaaguccgaaaaaggacccgucugcuggagaaagagagugaaaucagaauacaugcggcuccgacaacuaaagcgguucagacgagcagacgaagucaaaucaauguuuuccagcaaccgacagaaaauccuagaacgaaccgaaauacucaaccaagaguggaaacaacgucgcauacaacccguacacauccugaccaguguauccucccuacgcggaacaagagaaugcagcguuacaagcgaccuagacuuccccacacaaguaauaccccucaaaacccucaacgcaguagccucgguacccaucauguacuccuggucaccccuacaacaaaacuucauggucgaagacgagaccguccuccacaacauacccuacaugggggacgaaguccuagaccaagacgguacguucaucgaagaacuaaucaagaacuacgacggcaaaguacacggcgaccgugaaugcggcuucaucaacgacgagauuuucgucgagcuagugaacgcacuaggccaauacaacgacgacgaugacgacgacgacggcgacgaccccgaagaacgggaggaaaaacaaaaagaccuagaagaccaccgcgacgacaaagagagccgacccccgcggaaauuccccagcgacaaaauauucgaggcaauuagcucaauguucccagacaaaggaacagcagaagaacucaaagagaaguacaaagaacuaaccgaacaacaacuccccggugcgcuacccccagagugcacacccaacauagacggacccaacgccaaauccguacaacgggaacaaagccuccacagcuuccacacacucuucugccggcguugcuucaaauacgacugcuuccuccaucccuuccacgcaacgccaaacacuuacaaacgcaagaauaccgagacagcccucgacaacaaaccaugcggaccccaaugcuaccaacaccucgaaggagccaaggaguucgcugcagcccucacagccgaacggauaaaaaccccaccaaaaaggcccggaggccgaaggagaggccgccugccaaacaacuccucccgccccagcaccccuaccauaaacguccuggagucgaaggacacagacagcgaccgagaggccggaaccgagaccggaggcgaaaacaacgauaaagaagaagaagaaaagaaagacgagacaagcagcucguccgaagccaacagucgcugccaaaccccgaucaaaaugaaaccaaacauagaaccaccggaaaacgucgaauggucaggagccgaggccagcauguuccgcguacucaucgggacguacuacgacaacuucugcgcuaucgcaaggcugauaggcacaaaaaccuguagacaaguauaugaguucagagugaaagaauccucaaucauagcacccgcaccggccgaagacguagacacaccaccccgaaagaagaaacgaaaacacagacuaugggccgcacacugcagaaaaauccaacucaagaaagacggcucgagcaaccacguauacaacuaccaacccugcgaccacccccgacaacccugcgacagcucaugcccgugcguaaucgcccaaaacuucugcgaaaaauucugccaaugcagcuccgaaugccaaaacagauuccccggauguagaugcaaagcccaaugcaauaccaaacagugcccaugcuaccuagccguacgcgaaugcgacccagaccucugccucacaugcggagcugcagaccacugggacagcaaaaacguuucauguaaaaacugcucaauccagcgaggcagcaagaaacaucugcuccucgcacccucagacgucgccggauggggaaucuucauaaaggacccaguccagaaaaacgaguucauauccgaauacugcggggaaauaauaucccaagacgaagcagacaggagaggaaaaguguacgacaaauacaugugcagcuuccuauucaaccucaauaacgacuuuguugucgacgcaaccagaaaaggcaacaaaauaagauucgcgaaccacagcguaaaccccaacugcuacgcaaaagucaugaugguaaacggagaccacagaaucggaauauucgcaaaacgagcgauccaaacaggagaggaacuauucuucgauuaccgguacucacaagcagacgcacuaaaauacgucggcaucgaacgggaaauggaaaucccauag

SEQ ID NO: 4198 - RNA, 2124 nt, Artificial Sequence
  AEN79481 variant
augggccaaacaggcaaaaagucggaaaaaggcccggucugcuggcgcaaacgcgucaaguccgaauacaugagacuacgccaacugaaacgcuuccgccgagccgacgaaguaaaguccauguucuccucaaaccgccaaaagauacuagaacgaaccgagauacuaaaccaagaauggaagcaaaggcgaauccaaccaguccacauacucacauccguaagcucacuacgaggcacccgcgaagucgaagacgaaaccguacuccacaacaucccauacaugggagacgaaguccucgaccaagacggaaccuucauagaagaauuaaucaagaacuacgacggcaaaguacacggcgaucgggaaugcggauucauaaacgaugaaaucuucgucgagcuagucaacgcccugggacaauacaacgacgacgacgacgacgacgacggcgacgacccagaagaacgcgaagagaaacaaaaagaccucgaagaccaccgugacgacaaagaaucgcgcccaccacgaaaguucccaucggacaaaaucuucgaagcaauaucguccauguuccccgacaaagggaccgcagaagaacuaaaagaaaaguacaaggaacucacagaacagcaacucccgggcgcccuaccaccagaaugcaccccaaacaucgacggccccaacgccaagagcguucaacgcgaacaaagccuccacagcuuccacacauuauucugccgccgcugcuucaaauacgacugcuuccuccaccccuuccacgcgacaccaaacaccuacaagcgcaaaaacacugaaacagcacucgacaacaaacccugcggcccccaaugcuaucagcaccucgagggagccaaagaguucgccgcagcacugaccgccgaaagaaucaaaacaccacccaaaagaccaggcggaagacgacgcggccgacucccaaacaacucaucccgccccuccacccccacaaucaauguccucgaauccaaggauaccgacuccgaccgagaagccggcacggaaacaggcggagaaaacaacgacaaggaggaagaagaaaagaaagacgaaaccucaagcuccuccgaagccaacucacgcugccaaacgcccaucaaaaugaaacccaacauagaacccccggaaaacgucgaauggagcggagccgaagcaucaauguuccgaguacucauaggcaccuacuacgacaacuucugcgcuaucgcgaggcuaauagggacaaaaacaugccgccaaguuuacgaguuccgugucaaagagagcagcaucaucgcacccgcgcccgcagaagacguagacacaccacccagaaagaagaaacgcaaacaccgccucugggccgcccacugcagaaaaauccaacucaagaaagacggcagcucaaaccacgucuacaacuaccagccaugcgaccacccacgccagccaugcgauagcagcugccccugcgucauagcccaaaacuucugcgagaaauucugccaaugcuccagcgaaugccaaaaucgauuucccgggugccgcugcaaagcccaaugcaacacuaaacaaugcccaugcuaccuggcgguacgagaaugcgaccccgaucuaugccugaccugcggggcagccgaccauugggacagcaaaaacguaucaugcaaaaauugcucaauacaacgaggaagcaagaaacaccuccuacucgcaccauccgaugucgcaggauggggaauauucaucaaagaccccguccagaaaaacgaguucaucagcgaauacugcggcgaaaucauaagccaagacgaagcugacagacgcgguaaagucuacgacaaauacauguguagcuuccucuucaaccucaacaaugacuucgucgucgacgcaacccggaaaggcaacaaaauucgcuucgcaaaccacagcgucaacccaaacugcuacgccaaaguaaugaugguaaacggcgaccacagaaucggcaucuucgcgaaaagggcuauccaaacaggagaggaacuguucuucgacuaccgcuacucacaagcagacgcacucaaauacgucggcauagaaagagaaauggaaaucccguag

SEQ ID NO: 4199 - RNA, 399 nt, Artificial Sequence
  AAB87141 variant
auggucgaggccuucugcgcgaccuggaaacugaccaacagccagaacuucgacgaguacaugaaagcgcucggggucggguucgcgaccaggcaagugggcaacgucacgaaaccgaccgugauaauaagccaggaaggggacaaggucgugaucaggacccugagcacguucaagaacacggaaaucagcuuucaacugggcgaggaguucgacgaaaccacggccgacgacaggaacugcaaaucggucgugagccuggacggggacaagcucgugcacauacaaaagugggacggcaaggaaacgaacuucgucagggaaauaaaagacggcaagauggugaugacgcucacguucggggacguggucgcggucaggcacuacgaaaaggccuag

SEQ ID NO: 4200 - RNA, 765 nt, Artificial Sequence
  CAA36870 variant
auguggcaacuccuccuccccacugcccuccuccuccucgucucagccggcaugcgcaccgaagaccuccccaaagccgucgucuuccucgaaccacaaugguaccgcguccuggaaaaagacuccgucacccucaaaugccaaggcgccuacucccccgaagacaacagcacccaaugguuccacaacgaaucccuaaucuccucccaggccuccucauacuucaucgacgccgccacugucgacgacuccggcgaauaccgcugccaaaccaaccucucaacccucuccgaccccguccaacucgaaguccacaucggcuggcuccuccuccaagccccucgcugggucuucaaagaagaagaccccauccaccuacgcugccacuccuggaaaaacaccgcccuccacaaagucacauaccuccaaaacggcaaaggccgcaaauacuuccaccacaacuccgacuucuacauacccaaagccacacucaaagacuccggcuccuacuucugccgcggccucuucggcuccaaaaacgucuccuccgaaaccgucaacaucaccaucacccaaggacucgccguauccacaaucuccuccuucuucccacccggcuaccaagucuccuucugccuagucaugguccuccucuucgccgucgacaccggccucuacuucuccguaaaaaccaacauccgcucauccacucgcgacuggaaagaccacaaauucaaauggcgcaaagacccccaagacaaauaa

SEQ ID NO: 4201 - RNA, 873 nt, Artificial Sequence
  CCDS1232.1 variant
augggcggcggcgccggcgaacgccuauucaccuccuccugccuaguaggucucgucccccuuggccuacgcaucagccuuguaaccugcccccuccaaugcggaaucauguggcaacuccuccuccccaccgcacuccuccuccucgucuccgccggcaugcgcaccgaagaccuccccaaagcagucgucuuccucgaaccccaaugguaccgcguccucgaaaaagacagcgucacccucaaaugccaaggcgccuacucccccgaagacaauuccacccaaugguuccacaacgaaucccucaucuccucccaagcauccuccuacuucaucgacgcagccaccgucgacgacuccggagaauaccgaugccaaaccaaccucuccacccucuccgaccccguccaacucgaaguccacaucggauggcugcuccuccaagcaccccgcugggucuucaaagaagaagaccccauccaccuacgcugccacuccuggaaaaauaccgcccuccacaaagucaccuaccuccaaaacggcaaaggccgcaaauacuuccaccacaacucagacuucuacauaccuaaggccacccucaaagacuccggcuccuacuucugccgaggccucuucggcuccaaaaacgucuccuccgaaaccgucaacaucaccaucacccaaggacuagccgucuccaccaucuccuccuucuucccacccggcuaccaagucucuuucugccucguuauggucuuacucuucgccguggacaccggacucuacuucuccgucaaaaccaacauccgcuccucaacccgcgacuggaaagaccacaaauucaaauggcgaaaagacccccaagacaaauaa

SEQ ID NO: 4202 - RNA, 807 nt, Artificial Sequence
  AAH74858 variant
augucccucuccuuccuccuccuccuauucuucucccaccucauccucucagccugggcccacggcgaaaaacgccucgcccccaaaggccaacccggccccgccgccaccgaccgaaacccccgcggcuccuccucccgccaauccuccuccucagcaaugucaucuuccuccgccuccucaucccccgccgccucccucggcucccaaggcucaggccucgaacaauccucuuuucaauggucccccucuggccgccgcaccggcucccucuacugccgcgucggaaucggcuuccaccuccaaauauaccccgacggcaaagucaacggcucccacgaagccaacaugcucucaguccucgaaaucuucgcaguaucccaaggcaucgucggaauacgcggcguauuuuccaacaaauuccuagccauguccaaaaaaggaaaacuccacgccuccgccaaauucaccgacgacugcaaauuccgcgaacgcuuccaagaaaacuccuacaacaccuacgcaucagccauccaccgcaccgaaaaaaccggccgugaaugguacguugcacugaacaaacgaggcaaagccaaacgaggcugcuccccccgcgucaaaccccaacacaucucaacccacuuccucccacgcuucaaacaauccgaacaacccgagcuaucauucaccgucaccguccccgagaaaaaaaaaccacccucccccaucaaacccaaaaucccccucuccgccccccgcaaaaacaccaacuccgucaaauaccgccucaaauuccguuucggcuaa

SEQ ID NO: 4203 - RNA, 117 nt, Artificial Sequence
  AAB06462 variant
augagcacacgcugcggcgaagccggacgcgcacgcggaacccaaccccaccgcggauacagagcccaaaaccaacccuacaaaaugcaccuaggcccacccagacucgaagaauaa

SEQ ID NO: 4204 - RNA, 2466 nt, Artificial Sequence
  AAA59470 variant
augguauccuggggccgcuucauaugucuugucguaguaacaauggccacacucucccucgcgagaccguccuuuucacuggucgaagacacaacccuagaacccgaagaacccccgaccaaauaccagaucucacaaccggagguauacgucgccgcacccggcgaaucccucgagguacgcugccuccucaaagacgcagcagucaucucauggaccaaagaugguguacaccuggguccaaacaaccgcaccguccuaaucggagaguaccuccaaauaaagggcgccaccccacgagacuccggacucuacgcaugcaccgccagccgaaccguagacucugagacaugguacuucauggucaacguaaccgacgcaaucucauccggcgacgacgaagacgacaccgacggcgcagaggacuucgucagcgaaaacagcaacaacaaacgcgcgcccuacuggaccaacacagaaaagauggaaaaacggcuacacgccguaccugcggccaacacagugaaauuccgaugccccgcuggaggcaacccgaugccgacaaugagauggcucaaaaacggcaaagaguucaaacaagagcauagaaucggaggauacaaagugagaaaccaacacuggagccucauaauggaguccgucguccccagcgacaaaggaaacuacacaugcguaguagaaaacgaauacggaucaaucaaucacaccuaccaccucgacgucguagaaagguccccucacagacccauacugcaagccggacucccagccaacgcuuccaccguaguuggcggcgacgucgaguucguauguaaagucuacucugacgcccagccccauauccaauggaucaagcacgucgagaaaaacggcagcaaauacggcccagacgggcucccguaccucaaaguccucaaagccgccggugugaacaccacagauaaagaaauagaaguccuauacauccgcaacgucaccuucgaagacgccggcgaauauaccugccucgccggaaacucaaucggaaucagcuuccacuccgcauggcucaccguccucccggcccccgggagggaaaaagaaaucaccgcaucacccgacuaccuagaaaucgcaaucuacugcauuggagucuuucucauagcaugcauggucguaaccgucauauuaugccgcaugaaaaacaccaccaagaaacccgacuucuccucacagccagcaguacacaaacucaccaaacgcauuccgcuacgacgccaagucacaguauccgccgaauccagcagcucaaugaacagcaacaccccacucgucagaauaacaacccggcucucgagcacagcagauacaccgaugcuagccggagugagugaauacgagcuaccagaagacccaaaaugggaauuuccacgagacaaacucacccuaggaaaacccuuaggcgaaggcugcuucggccaaguugucauggcagaagcaguagggaucgacaaggacaagcccaaagaagcgguaacagucgcggucaaaaugcuaaaagaugacgccaccgaaaaggaccucuccgaccucgucagcgaaauggaaaugaugaaaaugaucggcaaacauaagaacaucaucaaccuccugggcgccugcacccaagauggcccccuauacguaaucgucgaguacgccaguaaaggcaaccuacgggaguaccuccgggccagaagaccgccuggaauggaauacuccuacgauaucaaccgcguccccgaagaacaaaugaccuucaaggaccucgucuccugcacauaccaacucgcacgcggaauggaguaccucgccagccagaaauguauccacagggaccuagcugcuagaaauguacucgucacugaaaacaacgucaugaagaucgcagauuucgggcucgcccgagacauaaacaacaucgacuacuacaagaaaacaaccaacggccgauuaccugugaaauggauggcacccgaagcccuauucgaucgcgucuacacacaccaaagcgacguguggagcuucggcguucuaaugugggagaucuucacucucggcggauccccauacccugggauccccgucgaagaacucuucaaacuccucaaagaaggccacagaauggacaaaccggccaacugcaccaacgaauuguacaugaugaugcgagacugcuggcaugccguccccucccaaagaccuacguucaagcaacuggucgaagaccucgaccggauccuaacccuaacaacaaacgaggaauaccuagaccucagccaaccccuagaacaauacucaccgaguuaccccgacaccagaagcuccuguucauccggcgacgacuccguauucucacccgacccaaugcccuacgaaccaugccucccccaauacccgcacaucaauggauccgucaagaccuaa

SEQ ID NO: 4205 - RNA, 1908 nt, Artificial Sequence
  EAW74574 variant
auggcacccccacuccuccuccuacucuuagcauccggcgccgccgccugcccacuccccugcguuugccaaaaccuaagcgaaucccuguccacucuaugcgcccacagaggacuacucuuugugccacccaacgucgaccgaagaacaguagaacuuagacucgcagacaacuucauccaagcacuaggcccacccgacuuccggaauaugaccggccucguagacuuaacccucucccgcaacgcaauaacacgaauaggcgcacgagccuucggcgaccuugaaucccuaagaucccuccaccucgacggcaaccgccuagucgaacucggcaccgguucacuuagaggacccgucaaccuccaacaccuaauucucuccgguaaccaacucggucgaaucgcccccggagccuucgaugauuuccuagaaucauuagaagaucuugaccuauccuacaacaaccuccgacaagucccaugggcaggaauaggcgcaaugcccgcauuacacacacucaaccuagaccacaaucuaaucgaugcucuaccacccggcgcauucgcccaacuaggacaacucucacgucuggaccuuacaucaaaccguuuagcuacccucgcaccggacccccuauucucucgcggaagagacgccgaagccagccccgcgccccuaguccucucauucuccggcaacccucuccacugcaacugcgaacuccuauggcuccgacgacuagcacgccccgacgaccuagaaacaugcgcuuccccaccuggacuagccggcagauauuucugggcgguaccagaaggagaguucuccugcgaacccccacucaucgcccgacacacccagcgacuguggguacucgaaggccaaagagcaacguuacgcugccgugcccucggcgaccccgcaccaaccaugcacugggucggcccagaugaccgucucguaggcaacucauccagagcccgagccuucccaaacggcacccuagaaaucggcgucacuggagccggcgacgcaggaggcuauaccugcaucgccacaaacccagcaggcgaggcaacagcacgagucgaacuaagagucuuagcccuaccgcacggcgguaacuccucagccgaagguggccgccccggcccaucagacaucgccgccucagccagaaccgccgccgaaggagagggcacacuagaaucugaacccgcaguccaaguaaccgaagugacagccacuuccggcuuaguaagcuggggaccaggaagacccgcagacccaguauggauguuccaaauacaauacaacucaagcgaagacgagacccucaucuaccgcauaguccccgcaucaucacaccacuuccuccucaaacaccuaguacccggagcagacuacgaccuaugccuccucgcccucagccccgcagccggccccucagaccucacagccacccgccuacucggaugugcccauuucucgaccuuacccgcguccccacucugucacgcacuccaagcccacguccuaggcggcacccuuaccgucgcugucggcggcguucuagucgccgcccuucucguauucacaguugcccuccuaguaagaggccggggcgcuggaaacggccgccuaccccuaaagcucucacacguacaaucccaaaccaacgguggaccaucccccacuccaaaagcccacccaccccgaucuccucccccgcgaccccagcgcucuugcucacuagacuuaggcgacgcgggaugcuacggcuacgcacgacgccuuggcggcgccugggccagacgcucacacucaguacacggaggccuccuaggagcuggaugucgcggcguaggcggcucagccgaacgacuagaagaaagcguugucuaa

SEQ ID NO: 4206 - RNA, 3297 nt, Artificial Sequence
  EAW96782 variant
augcccccgcgccagcccccacgccaagcaggcggcggacucucucgcgaguucgggaagcuccuccccgcccucagccauuccccacucggaggccucggaucgggaucgggguccgucgcaccuggccaaggacgcgccggagccaugggcucccgcacccccgaaagcccgcuccaugccguccaacuacgguggggcccaaggcgaagacccccacuccucccucuacuccuccucuugcuacccccacccccucgcgucggcgguuucaaccuagacgccgaagcgcccgcuguccuaagcggaccuccagguuccuuuuucggcuucagcguagaguucuaccgcccaggcaccgacggagucuccguacuuguuggcgccccgaaggccaauacaucccaaccgggcguccuccaaggcggcgccguguaucuguguccuuggggcgcaucccccacccaaugcacgccaaucgaguucgauagcaaaggcucgcgucuacuagaaucaagccucagcaguucagaaggugaagaaccagucgaauauaaaucucuucaaugguucggagccaccguccgugcccacggcagcucgauacuggccugcgccccacuauacagcuggcguacagagaaggaaccccucucugauccugucggaacgugcuaccuaucuacagacaacuucacacggauccucgaauacgcccccugccgcucagacuucagcugggcagcgggccaaggauacugccaaggcggguucucagccgaguucacuaaaacaggccgcguaguccuaggagggccaggaucauauuuuuggcaaggccagauucucuccgcuacccaagaacaaaucgccgaauccuauuaccccgaguaucucauaaaccugguccaaggacaacuucaaacgcgccaagccucuuccauauacgaugacagcuacuuaggauauucaguagccguaggagaguucuccggcgacgacacagaagacuucguagcagggguuccaaagggaaaccuaacuuacggcuaugucaccauccuaaacggcagcgacauccgcucccucuacaauuucuccggagaacaaauggccucauauuucggcuacgcugucgccgcgacagauguaaacggcgacggccucgacgacuuacuugucggagcaccacuacuuauggaucgcacacccgacggcaggccccaagaaguaggccgugucuacguguaccuacagcacccggcggguaucgaacccacacccacccucacacuuacaggccacgacgaguucggccgauucggauccucacuuacaccccuuggcgaccuagaccaggacggguacaacgacgucgcuauaggugcgcccuucggaggcgaaacccaacaaggcgucgucuuugucuuuccagguggaccgggcggacuaggcagcaaacccagccaagucuuacaaccccugugggccgccucccacacuccggauuucuucggcucagcauuacgaggaggacgagaccuagacggaaacggauaccccgaccuaauugucgguucauucggcgucgacaaggccgucgucuacagaggaagacccaucguauccgcaucugcuucgcuaaccaucuucccagcgauguucaaucccgaagaacgcuccugcucucuggaaggaaaucccguugccuguaucaaccucagcuucugucuaaacgcaucagggaagcacguggccgacucaaucggcuucaccguugaacuucagcuagacuggcaaaaacaaaaaggugggguuagacgcgcacuguuccuagcaucacgucaagcaacucuaacccaaacccuccuaauacaaaauggcgcacgcgaagacugucgggaaaugaagaucuaccuucgcaaugaaagugaauuucgggacaaacuaucaccaauccauauagcccucaacuucucccuagacccacaagccccugucgauucucacggcuuaagaccagcacuccacuaccaaaguaaaucccgaaucgaagacaaagcacagauccugcuugacugcggugaagacaacauauguguacccgaccuacaacuugaggucuucggugaacagaaccacgucuaccuaggugacaaaaaugcacucaacuuaacauuucaugcccaaaauguaggcgaaggcggcgcauaugaagccgaacucagggucaccgcgccucccgaggcugaauacuccggccuaguacgccacccaggcaauuuuuccagccuguccugcgacuacuucgccgucaaccaaucccggcuccucguaugcgaccucgggaacccgaugaaagcuggcgccagccuauggggcggccucagauucacgguaccccaccuccgcgacaccaagaaaaccauacaguucgacuuccaaauacuaucuaaaaaccugaacaacucccaaucagacguaguuagcuuccgccuauccguggaagcgcaagcccaagucacuuuaaacggaguauccaaacccgaggccguccucuucccgguaucggacuggcacccccgcgaccaaccccaaaaagaagaagaccugggaccugcgguucaucacguauacgaacuaauaaaccaaggacccucaucuauaucccaaggcguccuggaacuauccugcccccaagcgcucgaagggcaacaacuucuauacguaacacgcgucacaggccucaacugcaccacaaaccaccccaucaacccuaaaggauuagaacuggacccagaaggcagccuccaccaccaacaaaaacgcgaagcgcccagccgauccagcgcaucaucaggcccccaaauccucaaaugcccugaagcugaaugcuuccgucuacgaugugaacuaggcccccuccaccaacaggaaagccagagccuacaacuacacuuccgaguaugggcgaaaaccuuccuccaaagagaacaccaaccguucucccuacagugcgaggcaguauauaaagcacuaaaaaugccauaccgcauccugccccgccaacucccccaaaaagagcgacaaguggccacggccguccaauggacaaaagcagaaggcuccuacggagucccacuauggauaaucauccucgccaucuuauucggucuccuccuauuaggacucuuaauauacauccucuacaagcuaggcuucuucaaacgaagccuccccuauggcacggcuauggaaaaagcccaacuaaaacccccagcaacauccgacgccuaa

SEQ ID NO: 4207 - RNA, 3597 nt, Artificial Sequence
  EAX08808 variant
auggcagaacauccgccgcuucuugacacuacccaaauccuaucauccgacauuucacuccuuucagcucccauagucucugccgacggaacacaacaagugauacucguucaagugaacccaggagaagcauucacuauaaggcgcgaagacggucaauuccagugcaucacuggccccgcccaaguccccaugaugucacccaauggguccguuccgcccaucuacgugccucccggauacgcuccccaaguaauagaagacaacggcguucgucgaguuguagucgucccucaagcaccagaguuccaccccgggagccacacgguccuccacagaagcccgcacccaccccuccccgguuucauacccgugccuaccaugaugccgccaccuccacgacacauguacucuccugucacgggcgcaggggacaugacaacacaauacaugccacaauaccagucaucccaaguauacggggacguagacgcccacaguacccacggacggucaaauuucagagacgaacggucuucuaagacauacgaacggcuccaaaagaaacucaaagaccgucagggcacgcaaaaagacaaaaugucauccccuccgucaagcccucaaaaaugccccucacccauuaacgaacauaacggccugaucaagggacaaauagcaggaggaauaaacacuggcuccgccaagaucaaaucaggcaagggaaaaggaggcacucagguagacaccgaaauagaagaaaaagacgaagaaacaaaagccuuugaagcacuacuaucuaacaucgucaaaccugucgccucugacauccaagcgaggaccgucguccuaacguggucuccacccuccucccugaucaacggagaaaccgacgagagcuccguaccugaacucuacggguacgaaguucuaauauccaguaccggcaaggacggcaaauauaaaucaguguacgucggagaagagacuaacaucacucucaacgaucugaaaccagccauggacuaccaugccaaaguucaagcggaauacaacagcauuaaaggaacccccucggaagcagaaauauucacaacccucuccugcgagcccgacaucccaaacccaccgcggaucgcaaaccgcaccaagaacagucugacccuacaauggaaagcccccucggacaacggcuccaagauacagaacuucguccuagaaugggaugaagggaaaggcaacggcgaguucugucaaugcuacauggggucccagaaacaauucaaaaucacuaagcuaucccccgccaugggaugcaaauuccgccuuagcgcccgcaacgauuacgggaccucaggauucagcgaagaaguacuauacuacacaucuggcugcgcacccucaaugcccgcaagcccaguacugacuaaggccggcaucaccuggcucucacuacaauggucuaagccuagcggcacuccauccgacgaaggcaucagcuacauacucgaaauggaagaagaaacguccggcuacgguuuuaagcccaaauacgacggcgaggaucucgccuacaccgucaaaaaccucagaagaagcaccaaauacaaauucaaaguaauugcauacaacagugaaggcaaaucaaacccaagcgaagucgucgaguuuacaaccugcccggacaagcccgggauucccguaaaaccaagcgucaaaggcaagauucacucccacuccuucaagauaacgugggaucccccaaaagauaacgggggcgccaccauaaacaaauacgucgucgaaauggccgagggaucaaacggaaacaaaugggaaaugaucuauagcggggcaaccagagagcaccuaugcgauagacucaauccaggcugcuucuaccgccuccgcgucuacugcaucucagacgguggccaaucagccguaucagaaucgcuguugguacagacaccagccgucccacccggccccugccucccuccccgccuccaaggucgaccaaaagcaaaagagauacaacuccgguggggcccaccacucguagacggcggcuccccuaucagcugcuacucggucgaaaugagcccuauagaaaaagacgagccgcgugaaguauaccaaggauccgaagucgaauguaccgugagcucuuuacugcccgggaagacauacuccuuccgacugcgagccgcgaacaaaaugggauucggccccuucucagaaaaaugcgacaucacaaccgcaccggggccacccgaccaaugcaagccaccccaaguuacaugucgcucggccacgugcgcccaagucaauugggaaguaccacucucuaacggcacugacgugaccgaauaccgccucgaauggggcggaguagagggcuccaugcagauaugcuacugcggccccggacuuucuuacgagauaaaaggacucagucccgccaccaccuacuauugccgaguacaggcccucuccguaguaggagccgguccauucucugaggucguagcaugcgucaccccucccagcgugcccggcaucguuacaugccuccaggaaaucucggacgacgaaaucgaaaauccacacuacagccccucgaccugccucgcaaucuccugggaaaaaccgugcgaccacgguucagagauccucgcguacucuaucgacuucggcgacaagcagucacuaaccgucggcaaagucacauccuauaucaucaauaaccuccaaccggacacgaccuaccgcauucgcauacaagcccuaaacucacuaggcgccggacccuucucucacaugauuaaacugaaaacuaagccccucccaccugauccaccccgccuugaaugcguagccuucucgcaccagaaccuaaaacuaaaauggggagaaggcacacccaagacccuaucaacagacucaauccaauaccaccuccaaauggaagacaaaaacggccgcuucgucucacucuaccgcgggcccugccacacguacaaaguccaacgucuaaacgaguccaccuccuauaaauucugcauacaggcuugcaaugaggccggcgagggaccccucucccaagaauacaucuucacaacccccaaauccgucccagccgcacuaaaggcaccgaaaaucgaaaagguaaacgaucacauaugcgaaauaacaugggaaugucuccagcccaugaagggggauccaguaauauacucccuacagguuaugcuaggcaaagacagugaguucaaacaaauauacaagggccccgauucgucguuucgcuacuccucacuccaacucaacugcgaauaccgauuucgcgucugcgcaauccgccagugccaagacucucucggccaccaagaucucgucggaccuuacagcaccacaguccucuucauuucccagcgaacagaacccccagcaagcaccaaccgugacaccguagaauccacacgcacacgucgcgcccucuccgacgaacaaugcgccgcggugaucuuaguacucuucgcauuuuucucuauacucaucgccuucaucauccaauacuucgucaucaaauaa

SEQ ID NO: 4208 - RNA, 3429 nt, Artificial Sequence
  EAX08809 variant
auguccggaccugcccaagucccaaugaugaguccaaacggcagcgucccacccauauacguacccccaggcuacgcaccacaagucaucgaggacaacggcgucagacgcgucguugucguaccccaagcccccgaguuccacccagguagccacaccguacuccaccgcucgccacacccaccccucccaggcuuuauccccgucccaacuaugaugccaccaccucccagacauauguacucucccgugaccggcgcaggcgacaugacgacccaauacaugccccaauaccaaagcucacaaguguacggagacguagacgcccacuccacccacggccgcuccaacuucagagaugaacgaaguagcaaaaccuaugaacgccuacaaaagaaacugaaagaucgccagggcacacaaaaagacaagaugucaagcccacccagcagcccccaaaaaugcccaucccccaucaacgagcacaacggacuaauaaaaggccagauugcaggcgggauaaauaccggauccgcaaaaaucaaaucagggaaaggcaagggaggcacacaggucgacaccgagaucgaagagaaagacgaagagaccaaagccuuugaagcccuucuuagcaacauugucaaaccaguagccuccgacauccaagcucgaacagucguacucacauggagcccaccauccucacucauaaauggggaaacagacgaaucaagcguccccgaacucuacggauaugaaguacucaucuccuccaccgguaaggauggaaaguacaaaagcgucuacgucggcgaggagaccaacaucacccucaacgaccucaaaccugcuauggauuaucaugcaaagguccaagcggaguacaacuccaucaagggcaccccuuccgaggcagaaauauucaccacccucucuugcgaacccgacaucccuaacccaccuagaauagcuaaccgcacgaaaaacucgcucacauuacaauggaaagcccccagcgacaacggcucaaaaauccaaaacuucguccuagaaugggacgaaggcaagggaaauggcgaguucugccagugcuacaugggcucgcaaaaacaauucaagaucacaaaacucuccccagcaauggggugcaaguuccgccuuuccgcccgaaaugacuacggcacuagcggauucagugaagaaguauuauacuacaccuccggcugugcgccaagcaugcccgccucaccaguucucaccaaagcaggcaucaccuggcugagccuacaauggagcaaacccuccgggacccccucagacgaaggcauauccuacauacucgaaauggaagaagaaaccuccggauacggauucaaaccgaaauacgacggagaagaccuagcauauaccgucaaaaaucuccgacgaucuaccaaauacaaguucaaaguaaucgcauacaacagcgaaggcaaaucaaacccuagcgaagucguagaguucacaacaugcccagauaaaccagggaucccggucaaaccaucagucaaagguaaaauccacucucacagcuucaaaauaacuugggacccaccuaaggacaacggcggcgccaccaucaacaaauacguaguugaaauggcugaaggcagcaacggcaacaagugggagaugauauauuccggcgcaacccgcgaacaccucugcgacagacucaaccccggcugcuucuaccgucugagaguauacugcaucucggacggaggacaauccgcaguauccgaaucgcuucuaguccagacacccgcggucccacccggccccugccuacccccaagacuccaagguagaccgaaagcaaaggagauucagcugcgcuggggucccccacucguagacggcggcuccccuauaucaugcuacagcguagaaaugagcccuaucgaaaaagacgaaccccgagaaguauaucaaggauccgaaguagaaugcacaguaucaucucuccuuccaggaaaaaccuacuccuuucgccuccgagcagccaacaaaaugggguucggccccuucuccgaaaagugugacauaaccaccgcuccgggcccucccgaccaaugcaagccuccgcaaguaacaugccgaucggcgaccugcgcccaggucaacugggaggucccucucagcaacgggaccgacgucacggaauaucgccuagaguggggaggggucgagggcuccaugcaaauuugcuacugcggcccaggucucucauaugaaaucaagggcuuaucacccgcuaccacauacuacugccgaguccaagcccuaucugucgucggagcgggccccuucucugagguaguagccuguguaacaccacccuccgucccaggaaucgucacgugucugcaagaaauaagcgacgacgagaucgaaaacccccacuacucccccuccacaugccucgccauuagcugggaaaagccuugcgaccacggcucagagauucuagccuacaguaucgacuucggugacaagcaaucccucacugugggaaaaguuaccucguacaucaucaacaacuuacaaccagacacaaccuaccgcaucagaauccaagcccuaaauucccuuggagcuggcccauucucccacaugauuaaacucaaaacuaagccccuacccccagacccaccacgacucgaaugcgucgccuucucccaucaaaaccucaaacuaaaguggggcgaaggaacgcccaagacgcuauccaccgauucgauucaauaccaccuccaaauggaagacaaaaacggcagauucguaagccuuuaucguggacccugucacacauauaagguccaacgccuuaacgagucgaccuccuacaaauucugcauccaagccugcaacgaagccggagaaggcccgcuuucccaagaauacauauucaccacaccaaagucaguucccgcagcccuuaaagcaccgaaaaucgaaaaaguaaacgaccauauaugcgaaaucaccugggaaugccuccaaccaaugaaaggcgaccccgucauauacuccuuacaagucaugcucggcaaagacucggaguucaaacaaaucuacaaggggccugacuccagcuucagauacucaucccuccaacuaaacugugaauaccgauuccgcguuugcgcuauccgacaaugccaggauagccucgggcaccaggaccuugucgggcccuacagcaccaccguccuauucaucucacaacgcacagaaccacccgcauccacgaaccgcgacaccgucgaauccacacgaacccgcagagcgcugucugaugaacaaugugcagccgucauccugguccuauucgccuuuuucuccauccuaaucgcguucauaauacaauacuucgucauaaaguaa

SEQ ID NO: 4209 - RNA, 1020 nt, Artificial Sequence
  EAW49214 variant
augcccccauccaaaccccacccccccguagucggcaaagucacacaccacuccaucgaacucuacugggaccuagaaaaaaaagcaaaacgccaaggcccccaagaacaaugguuccgcuucuccaucgaagaggaagaccccaaaaugcacaccuacggcaucaucuacaccggcuacgccaccaaacacgucguugaaggccucgaaccccgcacacuauaccgauuccgacucaaagucaccucacccucaggcgaaugcgaauacuccccccucguauccgucucaaccacaagagagcccaucagcuccgaacaccuacaccgcgccguaagcguaaacgacgaagaccugcucguacguauacuccagggcggccgcgucaaaguagacguccccaacaaauucggcuucacagcccucauggucgcggcccaaaaaggcuacacgcgccucguaaagauccuaguauccaacggaacagacguaaaccuaaaaaacggcuccggcaaagacagccucaugcuagcaugcuacgcaggccaccuagacgucgucaaauaccuccgccgccacggagccucauggcaagcccgcgaccucggaggcugcaccgcccuccacugggcagccgacggaggacacugcagcgucauagaauggaugaucaaggacggcugcgaagucgaugucguagauacgggcucaggcuggacaccccucaugcgcguaagcgcagucagcggcaaccaacgagucgcaagccuccucauagacgccggagccaacgucaacguaaaagaccgaaacggcaaaacaccccucauggucgcaguccucaacaaccacgaagaacuuguccaacuccuacuugacaaaggcgccgacgcaucagucaaaaacgaauucggcaaaggcguccuagaaauggcccgagucuucgacagacaauccgucguaucacuacucgaagaacggaaaaaaaaacaacgacccaaaaaaagcugcgucugcuaa

SEQ ID NO: 4210 - RNA, 3150 nt, Artificial Sequence
  BAF84259 variant
augggcucccgcacaccagaauccccacuccacgcaguccaacucagaugggggccccgacgccggccaccgcuacucccacugcuacuacuacuccuaccgccgcccccgagagucggcgguuucaaccuagacgcggaagcaccagccgucuuauccggaccgcccggauccuucuucggcuucuccgucgaguuuuaccgccccggcacggauggcgucucgguccucguuggagcucccaaagcaaauacuucccaacccggaguucuacagggcggugcagucuaccugugcccuuggggcgcaucccccacccaaugcacuccaaucgaguucgauuccaaaggcagccgacuccucgaaagcucacuuaguuccagcgaaggcgaggaaccuguggaguacaaaagucuacagugguucggcgcaacaguacgcgcccaugguucaagcauuuuagccugcgcucccuuguacucuuggcgaacugaaaaagaaccccuuagcgacccaguagggacgugcuaucuaagcaccgacaacuucacacgcauucucgaauacgcaccaugucgaucagauuucucaugggcagccggucaggguuauugccaaggcggcuucucagcagaguucaccaaaacuggacgugucguccuaggcggcccaggauccuacuucuggcagggucaaauacucagcgcaacucaagaacagauugccgaauccuauuacccagaauaccucaucaaccucguccaaggacagcuccaaacacggcaggcuuccuccauauacgacgacuccuacuuaggcuacuccgucgcagucggagaguucagcggcgacgacacagaagacuucgucgcgggcgugcccaaaggcaaccuaaccuacggcuacgucaccauccucaacggaucggacauaagaucccucuacaacuucucuggagaacaaauggcaagcuacuucgccuacgcagucgcggccacagacguaaacggagacggacuagacgacuuacucgucggcgcgccccuucucauggaucggacgcccgacggccgcccccaggaagucggccgagucuacguauaucuacaacacccagcagguaucgaaagcacaccaacacucacccucacuggccacgacgaguucggacgauuugggagcagcuuaaccccucucggcgaccuggaccaggacggcuacaacgaugucgccaucggggcaccguucggaggagaaacccagcaaggugucgucuucgucuuucccggaggaccaggaggccucgguucuaagcccucacaaguccuacaaccccucugggccgcaucccacaccccagacuucuuuggcuccgcccuacgcgggggccgagaucucgacggcaacggauauccagaccugauaguagggucauucggcguagacaaggccgucgucuaccgcggacgacccaucguaucggccagcgcgucacucacaauuuuccccgcuauguucaacccagaagaacgauccuguuccuuagaaggcaaucccguagcaugcaucaaccucagcuucugccucaacgcauccgguaagcacguagcagacucaauagguuuuacagucgaacuacaacuggacuggcagaaacaaaaaggcgggguaagacgcgcccucuuccucgcaucacgacaagcaacccuaacucaaacccuacucauucaaaacggggcccgugaagacugcagggaaaugaaaaucuaccuacgcaaugaaucagaauuucgcgacaaacuaucccccauacacauugcacucaacuucucccuagacccccaagcaccaguagacucacacggacuccggcccgcccugcacuaccaaucaaaaucccgaaucgaggacaaggcacagauccuucucggcugcggcgaagacaacaucugcguccccgaccuucaacuagaagucuucggagagcaaaaccacguauaccuaggagauaaaaacgcucuaaacuugaccuuccacgcacaaaauguaggagaaggaggcgcauacgaagcugaacuacgcgugaccgccccacccgaggcagaauacucuggccucguccgccaccccggaaacuuuagcucccuuuccugcgacuacuucgccgucaaccaaucccgacuacucgucugcgaccuagggaaccccaugaaagccggagccucacuauggggcggccuaagauuuacugugccccaucuacgagacaccaagaaaacgauccaauucgacuuccaaauccucagcaaaaaucucaacaacucucaaucagacgucguuucuuuucgccuaucuguagaagcgcaagcccaaguaacacuaaacggcgucagcaaaccggaagccguacucuuccccgucucagacuggcacccacgcgaccaaccccaagaagaagaagaccucggaccagccguacaucacgucuaugaacuaauuaaccagggccccagcagcaucucgcaaggcguacucgaacucucuugcccccaagcccuggaaggccaacagcuccucuacguaacacguguuacaggccucaacugcaccaccaaucauccuaucaaccccaaaggccucgaacucgaccccgaagggucccuccaccaccaacagaaaagagaagcuccauccagauccucagcauccucaggcccccaaauucucaaaugcccagaggccgaaugcuuccgguuacgcugugaacucggcccucuccaccaacaagaaagccaaucccuccaacuacacuuccgcgucugggcgaaaaccuuccuacaacgggaacaccaaccguuuagccuccaaugcgaagccgucuacaaagcacucaaaaugccauaccgcauccucccccgccaacucccccaaaaagaacgacaggucgccaccgccgugcaauggacuaaagcugaaggauccuauggaguaccacucuggaucaucauccuagccauccuguucggccuccugcuacuaggccuacuuaucuacauccucuauaaacucggcuucuucaaacgaucccucccauacggaacagcgauggaaaaagcgcaacucaaaccaccagccaccuccgacgcguga

SEQ ID NO: 4211 - RNA, 3150 nt, Artificial Sequence
  BAG35324 variant
auggguucacgcaccccagaaucaccccuccacgccguccaacuccgcugggguccccgacgucgcccaccacuccucccguuacugcuucuccuccuucccccgccaccccgcgucggcggcuucaacuuagacgcagaagcacccgccguucuauccggaccacccggauccuucuucggcuuuucagucgaguucuaucgccccggcaccgaugggguaucuguccuaguaggcgcucccaaagccaacaccagucaaccaggcguccuccaaggcggcgcggucuaccucugcccauggggcgccucgcccacccaauguacgccgaucgaguucgacagcaaaggaagccgccugcucgaaucuucacuaucuuccuccgaaggugaagaaccuguugaauacaaaagccuacaaugguucggagcaacagucagagcccacggcucguccauccucgcaugugcaccccuauacucauggagaacagaaaaagaaccccucucugacccggucgggaccugcuaccuauccacagacaacuucacccgcauccuagaauacgcgcccugccgaagcgacuucucaugggccgcaggccagggcuacugccagggaggauucucugccgaauuuacaaaaacuggucgcgugguccucgguggacccggcaguuacuucuggcaaggucaaauacugucggcaacccaagaacagaucgcagaaucauacuacccugaauaccuaaucaaccuaguacagggccaacuucaaacaagacaagcaucguccauuuacgacgacuccuaccucgguuacagcgucgcugucggcgaguuuucgggcgacgacaccgaagacuucgucgcaggagucccaaaaggaaaccugacauacggcuacgucacgauacucaacggauccgacauucgaucccuauauaacuuuuccggcgaacaaauggccuccuacuuuggcuacgccgucgcugcgaccgacgugaacggcgacggccucgacgaccuccuagucggcgcucccuugcucauggaucguacaccagacggacgcccucaaggcguaggccgcgucuacgucuaucuccaacaucccgccggaaucgaaccaacaccaacacucacccucaccggccaugacgaauuuggacgcuuuggcagcagccuaacaccccucggagaccucgaccaagacggcuacaacgauguggccaucggggcucccuuuggaggagaaacccaacaaggcgucgucuucguguuccccggaggccccggcggccugggcucaaaacuuucccaaguccuccagccacugugggcugcaucacacaccccggauuucuucggaucugcccugcgcggaggacgcgaccuagacgggaacggauaucccgaucuaaucguaggcucuuucggcguagacaaagcggucguguaucgaggacgccccaucgucucagcuagugcaagccugaccauauuccccgcuauguucaacccagaggaacgaucauguucacuagaaggcaauccagucgcgugcauuaaccucagcuucugccuaaacgcaucgggaaaacacguugcagacagcaucggguuuaccgucgaacuccagcuagacuggcaaaaacaaaaaggcggaguccgccgagcacucuuccuugccucacgacaagcaacccucacgcagacacuacucauccaaaacggagcccgagaagacugccgcgaaaugaagaucuaccucagaaacgaauccgaguucagagauaaacucucgccaauccauaucgcccugaacuuuucauuggacccacaagcaccggucgauucacacggacuacgaccagcccuccacuaccaaagcaagagccgaaucgaagacaaagcacagauccuccucgacugcggagaagacaacauaugcguuccagacuuacaacuagaagucuucggagaacaaaaucacgucuaucucggcgacaaaaacgcgcucaaccuaacuuuucaugcgcaaaacguuggagaaggcggcgccuacgaagccgaacuccgaguaaccgcucccccagaagccgaauacucgggacucguccgccaccccggcaacuuuuccucccuauccugcgacuacuucgccguaaaucagucgcgccuucuugucugcgaccuuggcaaccccaugaaagccggugccucauuaugggguggacuacgcuucaccgucccccaccuacgcgauaccaagaaaaccauccaauucgacuuucagauccucucuaaaaaucucaacaacucgcaaucagacguaguauccuuucggcucucaguugaagcccaagcacaagucacccucaauggcguuuccaaacccgaagccguccucuucccgguuucagacuggcacccuagagaccaaccccagaaggaagaagaccuugggcccgccguacaccacgucuaugaacuuauaaaucaaggaccaucgucuaucucgcaaggcguccuagagcuauccugcccccaggcccuggaaggacagcagcuccucuacgucacccgcgugacagggcuaaacugcaccaccaaccacccgauaaaccccaaaggccuagaauuagacccagaaggcucccuccaccaucaacagaaaagagaggcaccuucacgcucauccgcuagcucaggcccacaaauccugaaaugcccggaagcugaaugcuuccgacugcgcugcgaacuaggaccacuccaccaacaggaaucccaaucccuccagcuacacuucagagucugggcgaagaccuuccuacaacgagagcaccagcccuucagccuccaaugcgaagcaguauacaaagcacuaaaaaugccauacagaauacucccucgccaacucccccagaaggaacgacaaguagcaacggcaguccaguggaccaaagccgaaggcuccuacggcgucccucucuggauaaucauccucgcaauccuguucggccuacuccuccucggacugcuaaucuacauacucuacaaacuaggcuuuuucaaaagaucccuaccauacggaaccgcaauggaaaaggcccagcuaaaacccccggcgaccuccgacgccuaa

SEQ ID NO: 4212 - RNA, 1401 nt, Artificial Sequence
  BAG54537 variant
augcucucccuucgacaaagaaugaugcacgcccgauuccgcaacccacucuccagacaacccgcccgcccaucauaccgucaaggcuacaacggccgacccaacguggaaggaaagguucuccccgguagcaacggaaaacccaacggccaacgcauuaucaacggcccccaagguaccaaauggguagucgaccucgaccgcggcuuaguccuuaacgcagaaggaagauaccuacaagacucccacgggaacccccuccgaauaaaacuaggcggcgacggcagaaccaucguugaccuggaaggcacaccaguugucucccccgacggacucccacucuucggccaaggccgccacggaacaccccucgcuaacgcacaagacaaacccauccuaagccucggaggaaaaccacucgucggccuugaaguaaucaaaaaaacaacacaccccccaaccacaacaaugcaacccacuaccaccaccaccccccuuccaaccaccacaacaccacggcccacaacagccaccacacgcagaaccacaacccgacgcccgacaaccaccguccgcacaaccacucgaacuacuaccaccaccacccccaaacccaccacccccaucccaacaugccccccaggcacccucgaacgccacgacgacgacggcaaccuaaucauguccagcaacggcauccccgagugcuaugcagaagaggacgaauucucgggccucgaaaccgacacggccgucccaaccgaagaagccuauguuaucuacgacgaagacuaugaauucgaaacaagccgcccacccacaaccacagaaccaucaaccacagcaacaaccccccgcgucauccccgaagaaggcgccaucuccuccuuucccgaagaggaauucgacuuagccggcagaaaacgcuucguugcaccuuacgucacauaccucaacaaagacccaucagcacccugcucacucaccgacgcacucgaccauuuccagguagacucacucgacgaaaucauccccaacgaccuaaaaaaaucagaccucccaccccaacacgccccaagaaacaucacaguagucgccguagaaggcugccacucauucgucaucgucgacugggacaaagcaaccccaggagacguaguaaccggcuaccucgucuacucagccucauaugaagacuucauccgcaauaaaugguccacacaagcauccagcgugacacacuuacccauugaaaaccucaaacccaacaccagauacuacuucaaaguccaagcccagaacccacacggauacggcccaaucagccccuccguauccuucgucaccgaauccgacaacccccuacucgucguccgaccaccaggcggcgaacccaucuaa

SEQ ID NO: 4213 - RNA, 471 nt, Artificial Sequence
  BAG58437 variant
auggaagaacaacgcaacgaagaaauccaauccuucaucuacucccucaaacaaaugcuccucaacgucgaagccaacuccgccaaaguccaagaagaccucgaagccgaauuccaaucccuauucucccuccucgaagaacucaaagaaggcaugcucaugaaaaucaaacaagaccgcgcaucccgaaccuacgaacuccaaaaccaacuagccgccugcacccgcgcacucgaauccuccgaagaacuccucgaaaccgccaaccaaacccuccaagccauggacuccgaagacuucccccaagcagccaaacaaaucaaagacggcgucaccauggcccccgccuuccgccuaucccucaaagcaaaagucuccgacaacaugucccaccucauggucgacuucgcccaagaacgccaaaugcuccaagcccucaaauuccuacccggcgaacgcggcacccacuaa

SEQ ID NO: 4214 - RNA, 921 nt, Artificial Sequence
  BAH14721 variant
augaucuucgaagaacacggcuucagacgcacaaccccaccaacaaccgccacccccauccgccaccgccccaggccauacccacccaacguaggacaagaagcccucucccaaaccaccaucagcugggcccccuuccaagacaccagcgaauacaucaucucaugccaccccgucggcacagacgaagaaccccuccaauuccgcguacccggcacaagcacaagcgccacccugaccggccucacacgcggcgccaccuacaacauaauaguagaagcccucaaagaucaacaacgccacaaaguacgcgaagaagucgucaccgucggaaacucagucaacgaaggccucaaccaacccaccgacgacucaugcuucgacccauacacagucucccacuacgccgucggcgacgaaugggaacgcaugagcgaaucgggcuucaaacuacucugccaaugccucggcuucggaagcggccacuuccgaugcgacagcagccgauggugccacgacaacgggguaaacuacaagauaggcgaaaaaugggaccgccaaggcgaaaacggacaaaugauguccugcacaugccucggaaacggcaagggcgaguucaaaugcgacccccacgaagcaaccugcuacgacgacggcaaaaccuaccauguaggagaacaauggcaaaaagaauaccucggcgccauaugcagcuguaccugcuucggcggccaacgaggcuggcgcugcgacaacugccgacgccccggaggcgaacccuccccagaaggaacaacaggacaauccuacaaccaauacagccaacgcuaccaccaacgcacgaacacaaacgucaacugccccaucgaaugcuucaugccccucgacguccaagccgaccgagaagacagccgagaauag

SEQ ID NO: 4215 - RNA, 1920 nt, Artificial Sequence
  BAG61560 variant
auggaaaagauacuauucuaccuauuccugaucggaaucgccguaaaagcccaaaucugccccaagcgcugcgucugccaaauauuaucccccaaccucgcaacacuaugcgccaaaaagggccuccuguucgucccgcccaacaucgaucgccgcaccgucgaacuccgacucgccgacaacuuugucaccaacaucaaacguaaagacuucgcuaacaugaccuccuuagucgacuugacauuaucccguaacaccaucuccuucaucacuccccacgcuuucgccgaccuccgaaaccugcgcagccuacaccuaaauucaaaccgccucaccaaaauuaccaacgacauguucucugggcucuccaacuuacaccaccucauacucaacaacaaccaacuaacccucauaucguccaccgccuucgacgacgucuucgcccuagaagaacucgaccuauccuacaacaaccucgaaaccauccccugggaugcagucgagaaaaugguaucccuccacacccucagccucgaccacaacaugauagacaacauaccaaaaggcaccuucucgcaccuacacaaaaugacccgccuagacguuaccagcaauaaacuccagaaauuacccccggacccacucuuccaacgagcacagguacucgcaaccucaggaaucauaucccccucaaccuucgcccucucauucggcggcaacccacuucacugcaacugcgaacuccuauggcuccgucgucuaucccgugaauacgaccuggaaaccugcgcauccccuccccuacugaccggacguuacuucugguccauccccgaggaagaauuucucugcgaaccaccccuaauaacccgccacacccaugaaaugcgcguccucgaaggccaaagagccacacuacgcugcaaagcacgcggagaccccgaacccgccauacacuggauaucacccgaaggaaaacuaaucuccaacgcuacacgaucucuuguauaugauaacggcacauuggacauccuaaucaccaccguaaaagacaccggcgcauuuacaugcaucgccucaaaccccgcaggcgaagcaacccaaaucguugaccuccacauaauaaaacucccccaccuccuaaacuccaccaaccacauacacgagccggaucccggauccucggauaucucuaccucuaccaaaucuggcagcaacacuuccucuucuaacgacggcauaacaucacucacugcaacacgcguggucggcugcauccaauucacuacagaacaagacuauguccgaugccauuucaugcaaagccaguuccuuggcggcaccaugauaaucaucaucggcggcaucaucguagcuuccguucuagucuucauuauaauccuaaugaucagauacaaagucugcaacaacaacggccagcacaaagucacuaaagucagcaacgucuacucccaaacaaacggcgcccaaauccaaggcugcuccgucacccucccacaaucagucucgaaacaagccguuggccacgaagagaacgcccaaugcugcaaagccaccagcgacaacguuauccaaucauccgaaaccugcuccucccaagacuccgcaacuaccacauccgcccucccacccuccuggacguccuccaccucaguaucccaaaaacagaaacgcaaaacuggcaccaaacccagcacggaaccccaaaacgaagccgucaccaacgucgaaucccaaaacacgaaucguaacaacagcacggcucuacagcucgccucccgcccgcccgacagcgucaccgaaggccccacauccaagcgcgcccauaucaaacccaacgcccuccucaccaaugucgaccaaaucguccaagagacccaacgacuagaacucaucuaa

SEQ ID NO: 4216 - RNA, 1014 nt, Artificial Sequence
  BAG61984 variant
augauauucgaagaacacggcuuccgaagaaccaccccacccaccaccgccacccccauacgacaccgaccccgccccuaucccccuaacgucggcgaagaaauccaaauaggccacaucccacgcgaagacguagacuaccaccuguacccccacggacccggccucaaccccaacgcaagcacaggacaagaagcccucagccaaaccaccauauccugggcccccuuccaagacaccuccgaauacaucaucagcugccaccccguaggcacggacgaagaaccccuccaauuccgcgucccaggcaccucaaccagcgccacccucacaggccucacccgaggcgccacauacaacaucaucgucgaagcccuaaaagaccaacaaagacacaagguccgagaagaaguagucacagucggaaacagcguaaacgaaggacucaaccaaccaaccgacgacagcugcuucgaccccuacacaguaagccacuacgcagucggagacgaaugggaaagaaugagcgaauccggauucaaacuccucugccaaugccuaggcuucggaucaggccacuucagaugcgacuccucccgcuggugccacgacaacggcgucaacuacaaaaucggcgaaaaaugggaccgccaaggcgaaaacggccaaaugaugagcugcacaugccuaggaaacgguaaaggcgaguucaaaugcgacccacacgaagcaaccugcuacgacgacggaaaaaccuaccacgucggcgaacaauggcaaaaagaauaccucggagccaucugcucaugcacaugcuucggcggccaacgaggauggagaugcgacaacugccgucgccccggcggagaacccagcccagaaggcacaaccggacaauccuacaaccaauacucccaacgguaccaccaacgcaccaauacaaacgucaacugccccaucgaaugcuucaugccccucgacguccaagcagaccgcgaagacucccgcgaauaa

SEQ ID NO: 4217 - RNA, 3045 nt, Artificial Sequence
  BAG62013 variant
augcgagucaccugggcacccccacccucuauugaccuaacuaacuuccucguccgcuacucccccgucaaaaacgaagaagacguagcagaacucagcauaagccccuccgacaacgcaguagugcucacaaaucugcuaccaggaaccgaguacguaguuuccguuagcagcguauacgaacagcacgaauccacuccccucaggggccgccagaaaacaggccuugacuccccuacaggaauagacuucucugacauaaccggcaacagcuucacaguucauuggaucgcaccccgcgccaccaucacgggcuaccgcauccgacaccaccccgaacacuucucuggacgaccccgagaagaccgcgucccucacuccagaaacucaauaacuuugacaaaccucacacccggaacagaguacguagucuccaucgucgcacuaaacggcagggaagaaucaccccuccucaucggccagcaaucuacagucucagacguuccacgcgaccucgaagucguugccgcaacaccaacaucacuacuuauaagcugggaugcccccgcagucaccguccgauacuaccgcaucacauacggagaaacaggcggaaauucacccguccaggaguucacaguaccggggagcaagagcaccgccacaaucagcggacucaaaccaggaguagacuacaccauaaccgucuacgcagucaccggccgcggcgauuccccugcguccagcaagcccaucagcaucaauuaccguaccgaaauagacaagccaagccaaaugcaaguaaccgacguccaagauaauucaauuucaguaaaauggcugcccucaucgagcccagucacaggcuauagaguaacaacaacacccaagaacggcccaggaccuaccaaaacuaaaacagcgggccccgaccaaaccgaaaugacaauagaaggccuccaaccuaccguugaauacguugucuccguguacgcacaaaacccauccggagaaucccaaccacucguccaaacagccgucaccacaauccccgcucccacagaucuaaaauucacccaagugacuccaaccucccuauccgcacaauggaccccacccaacguccaacucaccggcuacagaguccgagugacacccaaagagaaaacuggacccaugaaggaaaucaaccuugcaccagauucaagcagcgucguagucucaggacucaugguagcaaccaaauaugaagucuccgucuacgcccuaaaagauacacucacauccagaccagcucaagggguagucaccacccuggaaaacgucagcccaccccgccgggcaagggucacggacgcgacagaaacgacaauaacaaucucauggcgaaccaaaacggaaacgauaacaggcuuccaagucgacgcugugccagcgaacggccaaacccccauacagagaaccaucaaacccgacguacgcagcuacacaaucacgggccuccaaccagggacagacuacaagaucuaucuauacacucuaaaugauaacgcucggagcucaccagucguaaucgacgccuccaccgcaaucgacgcucccaguaauuuacgcuuccucgcaacgacaccgaacucccugcuagucucauggcaaccgccccgagcacguauuaccggcuacauuauaaaauacgaaaaacccggcucaccuccccgcgaagucgugccacgcccccgucccggcguuacagaagcgacaauuacuggacuagagcccggcaccgaauacaccaucuacgucaucgcccucaaaaacaaucagaaguccgagccgcucaucggccguaagaaaaccgacgaacucccccaacucguaacccuaccccaccccaaucuucacggaccugaaauccuagacgugccaucaacaguacagaaaaccccuuucgucacccauccaggauacgacaccgguaacggcauacaacugcccggaaccagcgggcaacaacccucagucggucaacaaaugaucuucgaagaacacgguuuccgccgcaccaccccacccaccacagccacacccauccgacacagaccccgccccuacccucccaacguaggggaagaaauccaaauaggacacauacccagagaggacguagacuaccaccucuacccgcacggaccaggccucaaccccaacgcaucuaccgggcaagaagcauuaucucaaaccacaauaucaugggcuccauuccaagacaccagugaguauaucauaucaugccacccaguuggaaccgacgaggaaccacuacaauuccgcguacccggaacuuccaccucagcaacacucacaggacuaacccgaggcgccaccuacaacauaauagucgaagcccuaaaagaccaacaacgccacaagguacgagaagaagucguaacaguaggaaacucagucaacgaaggacuaaaucaaccaaccgacgacuccugcuucgacccguauaccgucucacacuaugcaguuggagacgaaugggaaaggaugucagaaucaggcuucaagcuccuaugccaaugccuagguuucggauccggccacuuccgcugcgacuccucacgguggugccacgacaacggggucaacuacaagaucggcgagaaaugggaucgacaaggagaaaacggccaaaugauguccugcacaugccucgguaacggaaagggcgaauuuaagugcgacccacacgaagccacaugcuacgacgacggcaaaaccuaucacguaggggagcaauggcaaaaagaauaccuaggcgccauuugcuccuguaccugcuucggcggccaacgcggguggcgcugcgacaacugccgccgccccggcggagaacccucaccugaaggcaccaccggacagucauacaaccaauacucucaacgcuaccaccaacgcacaaacacgaacgucaacugccccaucgaauguuucaugccccucgacguccaagccgaccgagaagauucccgcgaguag

SEQ ID NO: 4218 - RNA, 2685 nt, Artificial Sequence
  BAG62178 variant
augcgagucacaugggcuccaccacccucaauagaccucacaaacuuucuagucagauacucccccgucaagaacgaagaagauguagcagaacugucgaucuccccauccgacaacgccguaguacucaccaacuuacuucccggaacagaauaugucguaagcguaucauccguauacgaacagcacgaaagcaccccacuccgcggccgacagaaaacgggccucgacuccccaacaggcaucgauuucuccgauaucaccgcaaacucauucaccguacacuggaucgcgccccgcgccacaaucaccggcuaccguauacggcaccaccccgaacacuucucuggccgcccccgcgaagaucgcgucccccauucccgcaacagcauaacccucacaaaccuaacccccgggaccgaauacgucgucuccaucgucgcccucaauggacgagaggaaucaccccuccuaauaggacaacaaagcacgguaagcgauguuccccgugaccuagaggucguggccgccaccccaaccucacuccucaucagcugggacgccccagcgguaacgguacgcuacuacagaaucacauacggagaaaccggcggcaacucccccguccaagaguucacaguaccaggcucaaaauccaccgcuacaaucuccggccuuaaacccggcgucgacuacaccauaaccguuuacgcaguaaccggcagaggcgacucacccgcuucuucaaaacccauauccauaaacuaccgcaccgaaaucgacaaaccuucacagaugcaaguaaccgacguccaagacaacagcauaucagucaaauggcuccccuccuccucucccgucaccggauaccgcguuaccaccacccccaaaaacggcccuggcccgacaaaaacuaagaccgccggcccagaccaaacugaaaugacuauagaaggacuccaucccaccgucgaauacguggucucuguauacgcacaaaaccccagcggcgagucucagccgcucguacagacagcagucaccacaaucccagccccaacagaccucaaauucacucaagucacucccaccucacucucagcccaauggaccccacccaacguccaacuaacaggcuaucgaguccgcguaacucccaaagagaaaacaggccccaugaaggaaauaaaccuugccccagacuccucauccguugucguaucuggccucaugguagccacaaaauacgaagucagcgucuacgcucucaaagacacccuaacgucccgccccgcccaaggggucguuaccacacuagaaaacguaucaccucccagacgagcacgcguuacagaugcgaccgagaccacaaucacuauaucguggcgcaccaaaaccgaaacaauuacuggcuuccaaguggacgccguccccgccaacggccaaacccccauacagcgcaccaucaaacccgauguccgcucauacaccaucacaggccugcaacccgguacagauuacaaaauauaucuauacacacucaacgacaacgccagaucuucucccgucgucaucgaugccucaacugccauagacgcacccagcaaccuucgcuuccucgccacuacacccaacucccuccucguaucguggcagccaccccgugcacggauaacaggcuacauaauaaaauaugagaaacccggcagcccacccagagaagucguaccccgucccagacccggcguaaccgaagccaccaucaccggccucgaacccggcacagaauacacaauuuacgucauagcccucaaaaacaaucagaaaagcgagccccucaucggucgcaagaaaaccgggcaagaggcccuuagccaaaccacaauuucgugggcuccuuuccaagacaccucagaauacauaaucucuugccacccaguagggaccgacgaagaaccccuacaauuccgcgugccaggcacaucaacaucugcaacucuaaccggacuuacgcgaggggcuaccuacaacaucaucguagaagcacucaaagaccaacaacgacacaaaguuagagaagaagucaucaccguaggaaacuccgugaacgaaggucucaaccaaccaacggacgacagcugcuucgaucccuacaccguaucgcacuacgccguaggagaugaaugggaacgcaugucagagucaggauucaaacucuuaugccagugccuaggguuuggauccggccacuuccgaugcgacuccucccgcuggugccacgacaacggagucaacuacaaaaucggcgaaaaaugggauagacaaggagaaaacggccaaaugauguccugcacgugccuaggaaacggaaaaggcgaguucaaaugcgacccccacgaagcaacaugcuacgacgacggcaaaaccuaccacguaggagaacaauggcaaaaagaauaucucggcgcaaucugcucauguaccugcuucggugggcagcguggauggaggugcgacaacugcagacgcccaggcggcgaaccaucccccgagggcacuaccggacaaagcuacaaccaauacagccaacgauaucaccaacgaaccaacacaaacguaaacugcccuaucgaaugcuuuaugccccucgacguccaagccgaccgagaagacucacgcgaauga

SEQ ID NO: 4219 - RNA, 1152 nt, Artificial Sequence
  BAH12351 variant
auggccagcgccuuccgacuaucacucaaacccaagguauccgacaacaugacccaccucauggucgacuucagccaagaacgccaaaugcuccaaacacuaaaauuccucccaguccccaaagcacccgaaaucgacccagucgaaugccucgucgccgacaacuccguuaccguagccuggcgcaugcccgaagaagacaacaaaaucgaccacuucauccuugaacaccgcaaaaccaacuucgacggccucccccgcgucaaggacgaacggugcugggaaaucaucgacaacauaaaaggcaccgaguacacccucuccggacucaaauucgacuccaaguacaugaacuuccgcguccgcgcaugcaauaaagccguugccggcgaauacuccgaccccgucacccucgagaccaaagcccucaacuucaaccucgauaacuccucaucacaccucaaucuaaaaguagaggacacaugcguagaaugggaccccacaggaggaaaaggacaagaaagcaagaucaaaggaaaagaaaacaaaggcucaguccacgucaccucacuaaagaaacacaccucuggcacccccucacccaaacgcacaagcgucggaucacgaccacccgcgguacgcggcagccgcgaccgauucaccggcgaauccuauaccguacucggcgacaccgcaaucgagucaggccaacacuacugggaagucaaagcccaaaaagacugcaaaucauacuccgucggagucgccuacaaaacccuaggcaaauucgaccaacucggcaaaacaaacacauccuggugcauccacgucaacaacuggcuacaaaacaccuucgccgccaaacacaacaacaaaguaaaagcacucgacgucacaguacccgagaaaaucggagucuucugcgacuucgacggcggccaacucucauucuacgacgccaacuccaaacaacuccucuacucauucaaaaccaaauucacucaacccguacuccccggcuucauggucuggugcggcggccucucccucagcacaggcaugcaagucccaucagccgucagaacccuacaaaaauccgaaaacggaaugaccggcuccgccuccucacucaacaacgucguaacccaauaa

SEQ ID NO: 4220 - RNA, 441 nt, Artificial Sequence
  BAH14175 variant
augccccccuccaaaccccacccccccgucguaggcaaagucacccaccacuccaucgaacucuacugggaccucgaaaaaaaagccaaacgacaaggcccccaagaacaaugguuccgcuucuccaucgaagaagaagaccccaaaaugcacaccuacggcaucaucuacaccggcuacgccaccaaacacgucgucgaaggccucgaaccccgcacccuauaccgcuuccgccucaaagucaccucccccuccggcgaaugcgaauacuccccccucgucuccgucucaaccaccuccgaauacucagaccgcccacacuccccccucucccgauccauggaaaugaccuccaaccucgaaaaaaucuucugccucuccuucggccucacccgcucacgcaacgacaccaucuucaaacacugcaacaacaucugcuaa

SEQ ID NO: 4221 - RNA, 2055 nt, Artificial Sequence
  EAX08810 variant
auggcagaacauccaccucuccucgacacuacccagauccuaagcucagacaucucccuacuaagcgcaccgaucguauccgcagacggcacacaacaaguaauccucguacaagucaaccccggcgaagcauucacuauucgccgcgaagacggccaguuucaaugcaucacaggucccgcacaaguccccaugaugucccccaacggauccgugcccccgauauacguacccccaggauacgccccucaggucauagaggacaacggcguccgccgggucgucgucguaccgcaagcaccagaguuccacccaggaagccacacaguacuucaccgaucgccacaucccccucucccaggcuucaucccagucccaaccaugaugccacccccaccccggcauauguacagccccgucacaggcgccggagacaugaccacccaauacaugccacaauaccaauccucccaagucuacggagacguagacgcacacagcacccacggccgcucaaacuuucgcgacgaaaggagcucaaaaaccuacgagcgucuccagaaaaagcucaaagaccgccaaggaacacaaaaagacaagaugucauccccacccuccuccccgcaaaagugccccaguccaaucaacgaacacaacggccucaucaaaggccaaauagcgggaggaauaaacacaggcuccgccaaaaucaagucaggcaaaggaaaaggaggaacccaagucgacacagaaaucgaagaaaaagacgaagaaacaaaggccuuugaagcucuccucuccaacauagucaaacccgucgccagcgacauacaagcccgcaccgucguucuaaccugguccccacccagcucacucauaaacggagaaaccgacgaaucaagcguacccgaacucuacggcuacgagguacuaaucuccucaacaggaaaagacggaaaauauaaaagcgucuacgucggggaagaaacaaacauaacccuaaacgaccuaaaacccgccauggacuaccacgcaaaagugcaagcagaauacaacagcauaaaaggcacccccagcgaagccgaaaucuucaccacccucuccugcgagcccgacauacccaacccucccagaauugcaaaccguacuaaaaacucacucacacuccaauggaaagcacccuccgacaacgguucaaagauccaaaacuucguccuagagugggacgaaggcaaaggcaacggcgaguuuugccaaugcuacaugggcucgcaaaagcaauucaaaaucaccaagcucucucccgcuaugggcugcaaguuccggcuaucagcaagaaacgacuacgguaccagcggauucagcgaagaagugcucuacuacacaucaggcugcgccccaucaaugccagccucccccguucucaccaaagccgguauaaccuggcucagucuccaaugguccaaacccuccgguacccccagcgacgaagggauuagcuacauccucgaaauggaagaagaaaccuccggcuacggcuuuaaaccaaaauacgacggcgaagaccuugcuuacacggucaaaaaccuccgccgcucaaccaaauauaaguucaaaguaaucgccuacaacucagaagggaaaaguaaccccucagaagucguagaguucacaaccugccccgacaaacccggaauccccgucaaacccucagucaaaggaaaaauccacucacacagcuucaaaauaaccugggacccacccaaagacaacggaggcgccaccaucaacaaauacguagucgaaauggccgaaggauccaacggcaauaaaugggaaaugauuuauaguggcgccaccagagaacaccugugcgaccgccuaaacccaggcugcuuuuaccgccuacgagucuacugcauuuccgacggaggccaaucagccgucucagaaucacuacugguacaaacccccgccgucccacccggccccugccuacccccacggcuccaaggccgcccaaaagcaaaagaaauacagacacccuccggauaa

SEQ ID NO: 4222 - RNA, 492 nt, Artificial Sequence
  AAG35520 variant
augagcgaaagcggauucaaacugcuaugccaaugccuaggauucggaagcggacacuucaggugcgacagcagcagauggugccacgacaacggaguaaacuacaaaauaggagaaaaaugggacagacaaggagaaaacgggcaaaugaugagcugcacaugccuaggaaacggaaaaggcgaauucaaaugcgacccacacgaagccacaugcuacgacgacggaaaaacauaccacgucggagaacaauggcaaaaagaauaccuaggagcaauaugcagcugcacaugcuucggaggacaaagaggauggagaugcgacaacugcagaagaccaggaggagaaccaagcccagaaggaacaacaggacaaagcuacaaccaauacagccaaagauaccaccaaagaacaaacacaaacguaaacugcccaauagaaugcuucaugccacuagacguacaagcagacagagaagacagcagagaauaa

SEQ ID NO: 4223 - RNA, 1143 nt, Artificial Sequence
  AAA52471 variant
augauguucucaggcuucaacgccgacuacgaagcauccucaucccgaugcucaucugcauccccagccggcgacucucuaucauauuaccacucuccagccgacuccuucuccuccaugggcucacccgucaacgcacaagacuucugcaccgaccucgccgucuccuccgccaacuucauccccacaguaaccgcuaucuccaccucccccgaccuccaauggcucguccaacccgcacucgucuccucuguagcccccucccaaacccgcgcuccccaccccuucggcguacccgcgcccuccgcaggcgccuacucccgagcaggagucgucaaaacuaugaccggaggucgcgcccaaucaauuggacgacguggcaaagucgaacaacuauccccagaagaagaagagaaacggcgaauacgccgcgaacgcaacaaaauggccgccgcaaaaugccgcaaccgccgccgcgaacucacagacacccuccaagcagaaaccgaccaacucgaagacgaaaaauccgcccuacaaaccgaaaucgccaaccuccuaaaagaaaaggaaaaacucgaauuuauacucgcagcccaccgccccgccugcaaaaucccagacgaccuuggcuucccugaagaaaugagcgucgccucacucgaccucaccggcggccucccagaagucgccacccccgaauccgaggaagccuucacucucccccuccucaacgacccagaacccaagcccucagucgaacccgucaaauccaucuccagcauggaacuaaagaccgaaccguuugacgacuuccucuuccccgcauccucccgaccuagcggcuccgaaacagcucgcuccguccccgacauggaccucucaggcucauucuacgccgccgacugggaaccacuccacucggguucccucggaaugggacccauggccacggaacucgaaccccucugcaccccaguaguaaccuguacacccuccugcacagcauacacauccuccuucguauucacauaccccgaagccgacucauuccccagcugcgccgcagcccaucgcaaaggcuccuccagcaacgaacccucauccgacucccuaucaucccccacccuacucgcccucuaa

SEQ ID NO: 4224 - RNA, 1296 nt, Artificial Sequence
  AAG53607 variant
augcccaauccucgacccggcaaacccucagcaccaagccucgccuuaggacccuccccaggagcauccccaagcuggcgcgcagcacccaaagcauccgaccuccuaggagcccgaggccccggcggcacauuucaaggccgcgaccuacgaggaggugcccacgccuccucuuccucacucaaccccaugccacccucccaacuccaacuacccacccuaccccucgucaugguagcccccucaggugcacgccucggcccccucccccaucugcaagcacuccuacaagaccgcccccacuucaugcaccaacucuccacagucgacgcacacgcccgcacacccguccuacaaguacacccacucgaauccccagccaugaucucacucacuccacccacaacagccaccggcgucuucucacuaaaagcucgccccggucucccucccggcaucaacgucgccucacuugaauggguaucccgcgaacccgcccuacuaugcacauuccccaaccccuccgcaccccgcaaagacuccacacucucugccguaccacaaagcuccuacccacuccucgcgaacggcgucugcaaauggcccggaugcgaaaaaguauucgaagaacccgaagacuuccucaaacacugccaagccgaccaccuucucgacgaaaaaggacgcgcccaaugccuccuccaacgagaaaugguacaaucccucgaacaacaacucguccuagaaaaggaaaaacucucagccaugcaagcacaucuagccggaaaaauggcccucaccaaagcauccuccgucgccuccucagauaaaggaucauguugcaucguagcagcaggcucccaaggcccaguaguuccagccugguccgguccacgcgaagcucccgacucccucuucgcaguacgccgacaccucuggggcucccacgguaacucaaccuuccccgaguuccuccacaacauggacuacuucaaauuccacaacaugcgaccacccuucaccuacgccacacucaucagaugggccauacucgaagccccagaaaaacaacggacccucaaugaaaucuaccacugguucacacgcauguucgccuucuuccgcaaccaccccgccacauggaaaaacgccauccgccacaaccucucccuucacaaauguuucguacgcguagaauccgaaaaaggcgcagucuggacagucgacgaacucgaguuccgcaagaaacgcucccaacgacccucccgcugcuccaacccaacuccaggcccauag

SEQ ID NO: 4225 - RNA, 1098 nt, Artificial Sequence
  AAA52639 variant
auguggcuacgcucacacagacaacuuugccucgccuuccuucuagucuguguccucucaguaaucuucuuccuccacauccaccaagacucauucccccacggacucggccucuccauacuaugccccgaccgucggcuugucaccccucccgucgccauauucugccuacccggcacagccaugggacccaacgccuccuccuccugcccccaacaccccgccucacucuccgggaccuggaccgucuaccccaacggcagauucggcaaccaaaugggacaauacgcuacccuccuagcccucgcacaacucaacggacgccgcgccuucauccuccccgcaaugcacgcagcccuagcccccgucuuccgaauuacccuccccguccuagccccagaaguugacucccgcacccccuggcgagaacuccaacuucacgacuggaugucagaagaauacgccgaccuccgcgaccccuuccuaaaacuuuccggcuuccccugcucauggacauucuuccaccaccuccgcgaacaaauccguagagaauuuacccuccacgaccaucuccgcgaagaagcccaaucaguacucggccaacuucgacucggacgaaccggcgaccgaccacgcaccuucgucggcguccacguccgccgaggugacuaccuccaagucaugccucaacgauggaaaggagucgucggcgacuccgccuaccuccgccaagccauggacugguuucgcgcccgccacgaagcccccgucuucguagucaccuccaacggcauggaauggugcaaagaaaacaucgacaccucccaaggcgacguaaccuucgccggcgacggccaagaagccacccccuggaaagacuucgcccuccuaacccaaugcaaccacaccauaaugaccauaggcaccuucgguuucugggccgccuaccuagccggcggagacacugucuaccucgccaacuucacacuccccgacucagaauuucuuaaaauauucaagcccgaagccgccuuccucccagaaugggucggaauaaacgcagaccucucuccccucuggacccucgccaaaccuuaa

SEQ ID NO: 4226 - RNA, 1380 nt, Artificial Sequence
  EAW58359 variant
auggcaccccucugccccucucccuggcucccacuccuaauccccgccccugccccuggccuuacaguacaacucuuacucucccuccuccuccucguuccaguccacccccaacgcuuacccagaaugcaagaagacucaccccucggaggaggauccuccggagaagacgacccccucggcgaagaagaccugcccuccgaagaagacucccccagggaagaagacccacccggcgaagaagaccuccccggagaagaagaccuccccggagaagaagaccuacccgaagucaaacccaaauccgaagaagaaggcucccucaaacuugaagacuuacccaccguagaagccccaggcgacccccaagaaccucaaaacaacgcccaccgugauaaagaaggcgacgaccaaucacacuggcguuacggcggcgacccacccuggccccgcgucucccccgcaugcgccggucgcuuccaauccccagucgauauccgaccccaacucgcagccuucugccccgcccuacgcccauuagaacugcucggcuuccaacucccaccccuccccgaacuccgacuccgcaacaacggccacucaguccaacuaacccuaccacccggccuagaaauggcacuaggacccggccgcgaauaccgggcccuacaacuacaccuccacuggggcgccgccggccgacccggcuccgaacacaccgucgaaggccaccguuucccagccgaaauacaugucguacaccucucaacagccuucgccagaguagacgaagcccucggccguccaggcggccucgccguccucgccgcauuccucgaagaaggacccgaagaaaacucagccuacgaacaacuacucucccgccucgaagaaaucgcagaagaaggcuccgaaacacaagucccaggacuagacauaucagcacuccuacccuccgacuucucccgguacuuccaauacgaaggcucccucacuacacccccaugugcucaaggcguaauauggaccguauucaaccaaaccguaaugcucuccgccaaacaacuacacacccuaucagacacccucugggguccaggcgauucacgucuccaacucaacuuccgggcaacccaacccuuaaauggccgcgucaucgaagcauccuucccagcaggggucgauucgucaccccgcgcagccgaaccaguccaacucaacuccugccuugccgcaggcgacauacucgcacucguauucggccuccucuucgccgucacauccguggccuuccucguccaaaugcgccgccaacaccgccgcggcaccaaaggaggcguauccuaccgucccgccgaaguugcagaaacaggcgcauaa

SEQ ID NO: 4227 - RNA, 417 nt, Artificial Sequence
  U19142.1 variant
augagcuggcgcgggcgcucgaccuaucgcccgcgcccgcgcagauacguggaaccgcccgagaugauaggcccgaugaggcccgagcaauuuagcgaugaaguggaaccggccacgcccgaggaaggggaaccggccacgcaaaggcaagauccagcggccgcgcaagagggcgaggacgagggcgcgagcgcgggccagggcccgaaaccggaagcggacucgcaagagcaagggcacccgcaaacgggcugugaaugugaagauggcccggacgggcaagagauggauccaccgaacccggaagaggucaagaccccggaagaggaaaugcgcucgcacuaugucgcgcaaacgggcauacucuggcucuugaugaauaacugcuucuugaacuugagcccgcgcaagcccuag

SEQ ID NO: 4228 - RNA, 351 nt, Artificial Sequence
  AAH69397 variant
augagcuggcgcgggcgcucgacauaucgaccgcgcccgcgcagguacguggaaccgcccgagaugauaggcccgaugaggccagagcaauuuagcgaugaaguggaaccggccacgcccgaggaaggggaaccggccacgcaaaggcaagauccagcggccgcgcaagagggccaggacgagggcgcgagcgcgggccagggcccgaaaccggaagcgcacucgcaagagcaagggcacccgcaaacgggcugugaaugugaagauggcccggacgggcaagagauggaucccccgaacccggaagaggucaagaccccggaagagggcgagaaacagagccagugcuag

SEQ ID NO: 4229 - RNA, 357 nt, Artificial Sequence
  AAA82746 variant
augaacuugagcaggggcaagagcacguacuauuggccgcgcccgcgcagguacgugcaaccgcccgaggucauaggcccgaugaggcccgagcaauuuagcgaugaaguggaaccggccacgcccgaggaaggggaaccggccacgcaaaggcaagaucccgcggccgcgcaagagggcgaggacgagggcgcgagcgcgggccagggcccgaaaccggaagcggacucgcaagagcaagggcacccgcaaacgggcugugaaugugaagauggcccggacgggcaagagauggaucccccgaacccggaagagguaaagaccccggaagagggcgagaaacagagccagugcuag

SEQ ID NO: 4230 - RNA, 354 nt, Artificial Sequence
  AAH69470 variant
augucguggaggggaaggagcacguacuauuggccgagaccgagaagguacgugcaaccgccagagaugauaggaccgaugaggccagagcaauuuagcgaugaaguggaaccggcaacgccagaggaaggggaaccggcaacgcaaaggcaagaucccgcggcagcgcaagagggagaggacgagggagcgagcgcgggacagggaccgaaaccggaagcggacucgcaagagcaagggcacccgcaaacgggaugugaaugugaagauggaccggacgggcaagagauggauccaccgaacccggaagagguaaagacaccggaagagggagagggacagagccagugcuag

SEQ ID NO: 4231 - RNA, 354 nt, Artificial Sequence
  AAA82748 variant
augucguggaggggaaggagcacguacuauuggccgagaccgagaagguacgugcaaccgccagagguaauaggaccgaugaggccagagcaauuuagcgaugaaguggaaccggcaacgccagaggaaggggaaccggcaacgcaaaggcaagauccagcggcagcgcaagagggagaggacgagggagcgagcgcgggacagggaccgaaaccggaagcggacucgcaagagcaagggcacccgcaaacgggaugugaaugugaagauggaccggacgggcaagagauggauccaccgaacccggaagagguaaagacaccggaagagggagagaaacagagccagugcuag

SEQ ID NO: 4232 - RNA, 354 nt, Artificial Sequence
  AAA82749 variant
augucguggaggggcaggagcacguacuauuggccgagaccgcgaagguacgugcaaccgccagagguaauaggaccgaugaggccagagcaauuuagcgaugaaguggaaccggcaacgccagaggaaggggaaccggcaacgcaaaggcaagauccagcggcagcgcaagagggagaggacgagggagcgagcgcgggacagggaccgaaaccggaagcggacucgcaagagcaagggcacccgcaaacgggaugugaaugugaagauggaccggacgggcaagagguagauccaccgaacccggaagagguaaagacaccggaagagggagagaaacagagccagugcuag

SEQ ID NO: 4233 - RNA, 354 nt, Artificial Sequence
  AAC25989 variant
augucguggaggggcaggagcacguacuauuggccgagaccgagaagguacgugcaaccgccagagaugauaggaccgaugaggccagagcaauuuagcgaugaaguggaaccggcaacgccagaggaaggggaaccggcaacgcaaaggcaagauccagcggcagcgcaagagggagaggacgagggagcgagcgcgggacagggaccgaaaccggaagcgcacucgcaagagcaagggcacccgcaaacgggaugugaaugugaagauggaccggacgggcaagagauggauccaccgaacccggaagagguaaagacaccggaagagggagagaaacagagccagugcuag

SEQ ID NO: 4234 - RNA, 351 nt, Artificial Sequence
  AAC33676 variant
augagcuggcgcgggcgcucgacauauagaccgagaccgagaagguacguggaaccgccagagaugauaggcccgaugaggccagagcaauuuagcgaugaaguggaaccggccacgccagaggaaggggaaccggcaacgcaaaggcaagauccagcggccgcgcaagagggagaggacgagggcgcgagcgcgggccagggcccgaaaccggaagcggacucgcaagagcaagggcacccgcaaacgggcugugaaugugaagauggcccggacgggcaagagauggauccaccgaacccggaagaggucaagacaccggaagagggcgagaaacagagccagugcuag

SEQ ID NO: 4235 - RNA, 1344 nt, Artificial Sequence
  AAA35657 variant
auggaacuccuuaaacuuaaccgcuccguccaaggcaccggccccggacccggcgccucccucugccgccccggcgcaccccuccucaacucuucuuccgucggcaaccucaguugcgaaccccccaggauccguggcgccggcacccgcgaauuagaacucgcaauccgcaucacacucuacgcuguaaucuuccuaaugucaguaggaggcaacauguuaaucaucguuguacucggccucucacgucgccuccgcacaguaaccaacgccuuccuacucucccucgcagucuccgaccuccuccucgccgucgcaugcaugcccuucacccugcuccccaaccuaaugggaacuuucauauuuggcaccgucaucugcaaagcagucuccuaucucaugggcguuuccgucucugucuccacccucucccucgucgccaucgcgcuagaacgcuacuccgccaucugccgcccccuucaagcccgcguauggcaaacacgcucacacgcugcucgggucaucguagcaaccuggcuacucuccggacuucucaugguucccuacccaguuuacacagucguccaacccgucggcccgcgaguccuacaaugcguccaccgauggcccuccgcccgcguccgccaaaccuggucaguccuccuccuuuuacuucuauucuucauccccggcgucgucauggcagucgcuuacggccugaucucccgagaacucuaucucggccuccgcuucgacggcgacucugacuccgacucucaaucccgcgucagaaaccagggcggcuuacccggcgccguccaccaaaacggccgcugcagacccgaaaccggcgccgucggcgaagauucugacggcuguuacguacaacuaccacgcucccgccccgcucuagaacucaccgcacucaccgcucccggccccggcuccggcucccgacccacacaagccaaacuccuugccaaaaaacgcgucguccguaugcuccuagucauagucguccucuucuuccuuugcuggcucccaguauacucagcaaacaccuggcgagccuucgacggccccggcgcccaccgcgcacucuccggugcccccaucuccuucauccaccuccuuuccuacgccucagcaugcgucaaccccuuagucuacugcuucaugcaccgccguuuccgacaagcaugccuugaaaccugcgcacgaugcugccccagaccaccccgugcccguccucgagcacuccccgaugaagauccccccacacccuccaucgccucccucucccgccucucauacaccaccaucuccacccucggccccggcuaa

SEQ ID NO: 4236 - RNA, 2226 nt, Artificial Sequence
  AAD22449 variant
auggcccuauucacccccuggaaacucuccucucaaaaacucggauucuuccucguuacguucggcuuuaucuggggaaugaugcuccuccacuucacaauccaacaacguacccagcccgaaagcuccuccaugcuacgcgaacaaauacucgaccucucaaaacgcuacauaaaagcccuugccgaagaaaaucgaaacgucgucgacggccccuacgcaggcguuaugaccgcauacgaccuuaagaaaacccucgcuguacuccucgacaacauccuccaacgcauaggcaaacuugagucaaaagucgacaaccuaguagucaacggaacagguacaaacagcaccaacucaaccaccgccgucccuucccucgucgcccucgagaaaauaaacguagcagacauaaucaacggcgcacaagaaaaaugcguucucccacccauggacggauacccacauugcgaaggcaaaaucaaguggaugaaagacauguggcgcuccgaccccuguuacgcagauuacggaguagacgguucaaccugcuccuuuuucaucuaccucuccgaaguggaaaacuggugcccacaccuaccuuggcgcgccaagaaccccuacgaagaagccgaccacaacucacuugccgaaauacgcacugacuuuaacauccucuacucaaugaugaagaaacacgaagaguuuagauggaugcgacuccguauccgucgaauggccgacgccuggauccaggcgauaaaaucccucgcugaaaaacaaaaccuugaaaaacgcaaacgaaagaaaguccucgugcaccuaggccugcuaacaaaagaaucaggauucaaaauagccgaaacagccuucuccggcggcccacucggcgagcuaguacaauggucggaccuaauaacgucccucuaccuccuaggccacgacauccgcauaucagccucccuagccgaacuaaaagaaauaaugaagaaagucgucggaaaccgaagcggcugccccacaguaggcgaccgcaucgucgaacuaaucuacaucgacaucgucggccucgcccaguucaagaaaacccugggcccguccuggguccacuaccaaugcaugcuacgcguucuagacucauucggcaccgaaccagaguucaaccacgccaacuacgcccaauccaaaggucacaaaacacccuggggaaaauggaaccuuaauccacaacaauucuacaccauguucccccacaccccugacaacagcuuccuaggauuugucguagaacaacaccucaacucauccgacauccaccacauaaacgagaucaaacgccagaaccaaucccuaguauacggcaaagucgacucauucuggaaaaacaagaaaauauaccucgacaucauccacacguacauggaaguccacgccacuguuuacggcucuagcacgaaaaacauaccgucauacgugaaaaaccacgggauccucucagggcgugaccuccaguuccuccuccgcgaaacaaaacuuuucgucggccuagguuuccccuacgagggacccgccccgcuagaagcaaucgccaacggcugcgcguuucucaaucccaaauucaaucccccaaaaucauccaaaaacacagacuucuucaucggaaaacccaccuuacgugaacucacgagccaacaccccuacgccgaagucuucaucggccguccgcacgucuggacagucgaccuaaacaaccaagaagaagucgaagaugccguuaaagccauccuuaaccagaaaaucgaaccauacaugccauacgaguuuaccugcgagggcaugcuccaacgcaucaacgcuuucaucgaaaaacaagacuucugccacggccaagucauguggccgccccuaucagcccuccaaguaaaacuggccgagcccggacaauccugcaaacaagugugccaagaaucccagcucaucugcgaacccuccuucuuucaacaucuaaacaaagacaaagacauguuaaaauacaaagucacgugucaaucaagcgaacucgccaaagacauccucguucccagcuucgaccccaaaaacaaacacugcguguuccaaggcgaccuccuccucuuuucaugcgccggugcacacccacgacaccaacgcgucugccccugccgcgacuucauaaaaggucagguggcgcucugcaaagacugccuauag

SEQ ID NO: 4237 - RNA, 1743 nt, Artificial Sequence
  EAX11770 variant
auggcgggcaccguacguaccgccugccucgucguagccaugcuacuaucccuagacuuccccggacaagcccaacccccaccacccccacccgacgcaaccugccaccagguacgcucauucuuccaacgccuccagcccggccucaagugggucccagaaaccccagucccaggcuccgaccuccaagucugccuccccaagggaccaacaugcugcucccguaaaauggaagaaaaauaccaacucaccgcccgccuuaacauggaacaacuccuacaaucagccuccauggagcuaaaauuccuaaucauucagaacgccgccgucuuccaagaagccuuugaaauuguaguccgccacgcuaaaaacuauaccaacgccauguuuaaaaacaacuaccccucccucacaccccaagccuucgaguucguaggcgaguucuuuaccgacgucucucucuacauacucggcuccgacauaaacgucgacgacauggucaaugaacuuuucgauucccucuuccccgucauauacacccaacucaugaaccccggacucccagacucagcccucgacauaaacgaaugccuacguggcgcccgccgagaccucaaggucuucggaaacuucccaaaacucaucaugacccaaguaucaaaaucacuucaagucacccgaaucuuccuacaagcccuaaaccucggcaucgaagucauaaacaccaccgaccaccugaaauucucaaaggauugcggaagaaugcuuacacgcaugugguacugcucauacugccaaggacucaugauggucaaaccaugcggaggcuacugcaacguaguaaugcaaggcugcauggccggcguagucgaaaucgauaaauacuggcgcgaauacauccucucacucgaagaacucgucaacggcauguaccgcaucuacgacauggaaaacgugcuacucggacucuucucuacaauccacgacuccauacaauacguccaaaagaacgccggcaagcucaccacaacaauaggaaaacuaugcgcccacucccaacaacgucaguaccgcuccgccuacuauccagaagaccucuucauugacaagaaaguccucaaagucgcacacgucgaacacgaagaaacucucuccucacgccgacgcgaacuuauccagaaacucaaaucauucaucuccuuuuacagcgcccucccaggguacaucugcucccacucccccguagccgaaaacgacacucucugcuggaacggacaagagcuagucgaacgguacucccaaaaagcugcacgcaacggcaugaaaaaccaauucaaccuacacgaacucaaaaugaaaggcccagaaccugucgucagccaaaucaucgacaaacugaaacacaucaaccaacuacuccguaccaugucaaugccuaaaggccggguccucgacaaaaaccuagaugaagaaggcuucgagucaggagacugcggugacgacgaagacgaaugcaucggaggcagcggagacggaaugaucaaagucaagaaccaacuacgcuuccuugccgagcuggccuacgaccuugacguagacgacgccccgggaaacagccaacaagcaacaccuaaagacaacgaaaucuccacuuuccacaaccucggcaacguucacaguccccuaaaacuccucaccuccauggccaucuccgucgucugcuuuuucuuccucguacacuaa

SEQ ID NO: 4238 - RNA, 1743 nt, Artificial Sequence
  AAA93471 variant
auggcuggcacaguucgcaccgcaugccuaguugucgccaugcuccucucacuagacuucccuggccaagcacaacccccacccccgccacccgacgcaaccugccaccaaguccgcagcuucuuccaacgacuccagcccggccucaaauggguacccgaaaccccaguccccggcuccgaucuccaagucugccucccaaaaggcccuaccugcugcagcagaaagauggaagaaaaauaccagcugacagcccgacuuaacauggaacagcuacuccaaucugccucuauggaacucaaauuccuuaucauccaaaacgccgccgucuuccaagaagccuucgaaaucguaguacgccacgccaagaacuacaccaacgccauguucaaaaacaacuaccccagccugacaccccaagccuuugaauuugucggcgaguucuucaccgacgucucacuuuacauccucggaucagacauuaacgucgacgacauggucaacgaacucuucgacucccucuucccugucaucuacacccaacucaugaacccaggccuccccgauuccgcccucgacauaaacgaaugccuacgcggagcaagacgcgaccucaaagucuucggaaacuuccccaaacucauaaugacccaagucucaaagucccuacaagucacacgcauuuuccuacaagcccucaaccucggcauagaagucaucaacaccaccgaccaucucaaauucuccaaagacugcggccgcaugcucacccgcaugugguacugcucauacugccaaggccucaugauggucaaaccaugcggcggcuacugcaacgucguaaugcaaggaugcauggcuggcguagucgaaaucgacaaauacuggcgcgaauacauccucucccucgaagaacucgugaauggcauguacagaaucuacgacauggagaacguccuacuaggccuauucagcacaauacacgacuccauccaauacguucagaaaaacgccggcaaacucacaacaaccauuggcaaacugugcgcccacucccaacaaagacaauaccgcucugccuacuaccccgaagaccucuucaucgacaagaaaguacuaaaaguagcacacguagaacacgaggaaacccucagcucccgccgccgcgaacucauacaaaaauuaaaguccuucaucagcuucuacagcgcccucccaggcuacauuugcucccacagcccaguagccgaaaacgacacccucugcuggaacggccaggaacucgucgaacgcuacucacaaaaagccgcccgcaacggcaugaaaaaccaauucaaccuacacgaacucaaaaugaaagggcccgaacccgucguaucccaaaucauagacaaauuaaaacacauuaaccagcuacuccgcaccauguccaugccaaaaggccgcguccucgacaaaaaccuagacgaagaaggcuuugaauccggagacuguggagacgaugaagacgaaugcaucggaggcuccggcgacggcaugaucaaagugaaaaaccaacuccgcuuccuagccgaacuagcauacgaccucgacguggacgacgcacccggcaacucacaacaagccacaccaaaagacaacgaaaucuccacauuucauaaccucggcaacguucauucaccccucaagcuccucacaucuauggccauauccguaguaugcuucuucuuccugguccacuaa

SEQ ID NO: 4239 - RNA, 1743 nt, Artificial Sequence
  AAH35972 variant
auggccggcacaguacgaaccgccugccuaguagucgccaugcuccucucccuagauuucccaggacaagcacaacccccaccacccccaccagacgccacaugccaccaaguccguagcuuuuuccaacgacuucaacccggccucaaauggguccccgaaacaccagucccaggcagcgaccuccaaguaugccuccccaaaggaccaaccugcugcucacgcaaaauggaggaaaaauaccagcuaacagcacggcucaacauggaacaacuacuccaauccgccucuauggaacucaaauucuuaaucauccaaaacgccgccguauuccaagaagccuucgaaaucgucguacgccacgccaaaaacuacacuaacgccauguucaaaaacaacuaccccucccucaccccucaggcauucgaguucgucggggaguucuucacagacguaucccucuacauccucggcuccgacaucaacgucgacgacauggucaacgaacucuucgacucacucuuccccguaauauacacacaacucaugaaccccggccuccccgacagcgcccuugacaucaacgaaugccuuagaggggccagacgcgaccucaaaguauucggaaacuuccccaaacugaucaugacccaagucagcaaaucacuccaaguaacacgaauuuuccuucaggccuuaaaccugggcauagaagucaucaacacaacggaccaccugaaauucuccaaagacugcggacgaaugcuaacccgcaugugguacugcuccuacugccaaggacucaugauggucaaacccugcggcggcuacuguaacgucgucaugcaaggcugcauggccggcgucgucgaaauagacaaauacuggcgagaauacauccugucccuagaagaacugguuaacggcauguacagaaucuacgacauggaaaacguccuccuaggccuauucucaaccauccacgacagcauccaauacguacagaaaaacgcaggcaaacugaccacuacaauugguaaacuaugcgcacacucccaacaaagacaauaccgcuucgccuacuacccagaagaucucuucaucgacaagaaaguacuaaaaguugcccaugucgaacaugaagaaacacuaucaucaagaagacgcgaacucauccaaaaacuuaaaucguucaucuccuucuacuccgcccuacccggauacaucugcucccacucacccgucgccgaaaacgacacccucugcuggaacgggcaagagcucgucgagcgguacucccaaaaggcagcccgaaauggcaugaaaaaccaauucaaccuacacgagcucaaaaugaagggcccagaacccguagucucccaaaucaucgacaaacucaaacauaucaaccaacuacuccgcaccaugucaaugccaaaaggacgaguucucgacaaaaaccucgacgaagaaggauucgaaagcggagauugcggagacgacgaagaugaaugcaucggcggcucaggcgacggcaugauaaaagugaaaaaccaacuccgauuccuggccgaacuagccuacgaccucgauguggacgacgcacccggcaacucucagcaagccacaccaaaagacaacgaaaucucaaccuuccacaaccucggcaacguccacaguccucugaaacuacucacauccauggcgaucuccgucgucugcuucuucuuccucguacacuaa

SEQ ID NO: 4240 - RNA, 1683 nt, Artificial Sequence
  EAW93784 variant
auggaaugccuuuacuacuuccuaggcuuccuacuacucgcagcccggcucccccuagacgcagccaaaagauuccacgacguccuaggcaacgaacgccccucagccuacaugcgcgaacacaaccaacucaacggauggucuagcgacgaaaacgacuggaacgaaaaauuauaccccgucuggaaacgcggcgacaugcgcuggaagaacuccuggaaaggcggccguguccaagccguccucaccucggacuccccagcccuugucggcuccaacauaaccuuugccgucaaccuuaucuucccccgaugccaaaaagaagacgcgaacggcaacaucgucuacgagaaaaacugccgcaacgaagccggccucuccgcagaccccuacguauacaacuggacagccuggucugaagacuccgacggugaaaacggcacaggacaaucccaccacaacgucuuccccgacggaaaacccuucccccaccaccccggcuggcgccgcuggaacuucaucuacgucuuccauacccuaggucaauauuuccaaaaacucggccgaugcuccguccgcgucagcguaaauaccgccaacguuacacucggcccacaacucauggaagugacggucuaccgccgucacggccgagcauacguacccauagcacaagucaaagacguauacgucgucaccgaccaaauacccguauucgucacaauguuccagaaaaaugaccgcaacucaucagacgaaacauuccucaaagaccuccccaucauguuugacguccucauccacgaccccucccacuuccucaacuauuccacuaucaacuacaaauggucauucggcgauaacaccggacucuuugucuccaccaaccacacagucaaccacacauacguccucaacggcaccuucagccucaaccucaccguaaaagccgccgcccccggccccugucccccaccaccgcccccuccccgacccucaaaacccacccccucacucggccccgcuggagauaacccgcucgaacucagccgaauccccgacgaaaacugccaaauaaaucgauacggacauuuccaagcuaccaucacuaucgucgaaggaauccucgaagucaacauaauccaaaugaccgacguccugaugcccguaccguggcccgagucaucccucaucgacuuugucguaaccugccaaggcagcauaccaacugaagucugcacgaucauuagcgaucccacgugcgagaucacacagaacaccgucugcuccccagucgacgucgacgaaaugugccuacucaccguacgacgaaccuucaacggaagcggaaccuacugcgugaaccucacccucggagacgacaccucacucgcccucaccucaacccuaaucucugucccggaccgagacccagccucaccccuacgcauggccaacuccgcccucauauccgucggcugccuagccauauucgucacaguuaucagcuugcuagucuacaagaaacacaaagaauacaaccccaucgaaaacuccccgggcaacgucguacgcuccaaaggccuaucggucuuccucaaccgcgcaaaagccgucuuuuucccagguaaccaagaaaaggacccauuacucaaaaaucaagaauuuaaaggagucuccuaa

SEQ ID NO: 4241 - RNA, 1719 nt, Artificial Sequence
  AAH32783 variant
auggaaugccucuacuacuucuuaggcuuccuccuccuugcugcccgccucccccucgacgccgccaaaagauuccaugacguccucgggaacgagcgccccuccgcauacaugcgagaacacaaccaacuaaacggcugguccucagacgaaaacgauuggaacgaaaaacuauacccagucuggaaacgcggagacaugcgcuggaaaaacuccuggaaagguggccgaguucaagccguccucaccuccgacucccccgcgcuaguaggcuccaauaucaccuucgcaguaaaccuaaucuucccccgcugccagaaagaagacgccaauggcaacaucgucuacgagaaaaacugccguaacgaagcaggacuauccgccgacccuuacguauacaacuggaccgccuggucagaagacucugacggagagaacggcacaggucaaucccaucacaauguauuucccgacggcaaaccauucccucaccaccccggcuggcgccgcuggaacuucaucuacgucuuccacacccuaggucaauacuuccaaaaacucggcagaugcuccguccgcgucuccgucaauacagcaaacgucacccuuggcccacaacucauggagguuacagucuaccgcagacacggccgugccuacguucccauagcucaaguaaaagacgucuacgucguuaccgaccaaauaccaguauucgucaccauguuccaaaagaacgacagaaacuccuccgacgaaacuuuccucaaagaccucccuaucauguucgacguccucauccaugaccccagccacuuccugaacuacagcaccaucaacuacaaauggucuuuuggcgacaacacaggccucuucgucuccaccaaccacaccguaaaccacaccuacguccucaacgguaccuuuucccucaaccucaccgucaaagcagccgcacccggccccugcccaccaccaccacccccaccccgccccuccaagcccacccccucacuugcuaccacccuaaaguccuacgacucuaacacccccggccccgccggcgacaacccccucgaacucucaagaauccccgacgagaacugucaaaucaaccgauacggccacuuccaagccaccaucaccaucgucgaaggcauacuggaaguaaacauaauccaaaugaccgacguccuaaugcccguccccuggcccgaaucaucccucauagacuucguuguaacaugccaaggcagcauaccaacagaaguuugcaccauuaucucagacccaaccugcgaaaucacccaaaacaccgugugcucccccgucgacguugacgaaaugugccuuuuaaccguccgccgcaccuucaacggaucaggcaccuacugcguaaaccuuacacucggagacgacacaucccucgcauugaccagcacccuaauauccguccccgaccgcgaccccgcaucaccccuccgaauggccaacuccgcccucaucuccgucggcugccuagcaaucuucguaaccgucaucucccuacucgucuacaagaaacacaaagaauacaacccuaucgaaaacucucccggcaacguuguccguuccaaaggacucuccgucuuccucaaccgcgcaaaagcagucuucuuccccggcaaccaagaaaaagacccccuccuuaaaaaccaagaguucaaaggcgucuccuaa

SEQ ID NO: 4242 - RNA, 621 nt, Artificial Sequence
  CAD43718 variant
auggaaugccuauacuacuuccucggcuuccuccuccuagccgcccgccucccccucgacgccgccaaacgauuccacgacguccucggcaacgaacgccccuccgccuacaugcgcgaacacaaccaacucaacggcugguccuccgacgaaaacgacuggaacgaaaaacuguacccaguauggaaacgcggcgacaugcgcuggaaaaacuccuggaaaggaggacgcguacaagccguccucaccuccgacucccccgcccucgucggcucaaacaucaccuucgccguaaaccucaucuucccccgaugccaaaaagaagacgccaacggcaacaucgucuacgaaaaaaacugccgcaacgaagccggccucuccgccgaccccuacgucuacaacuggaccgccugguccgaagacuccgacggcgaaaacggcaccggccaaucccaccacaacgucuuccccgacggcaaacccuucccccaccaccccggcuggcgccgcuggaacuucaucuacgucuuccacacccucgacuggcuccuccaaacccccaaacuccuccucuaccucucccucaaauuccaacccucccucuuccuccucuacaacuga

SEQ ID NO: 4243 - RNA, 621 nt, Artificial Sequence
  AAH11595 variant
auggaaugccucuacuacuuccuaggcuuccuccuccucgccgcccgccucccccuagacgccgccaaacgauuccacgacguacuaggcaacgaacgacccuccgccuacaugcgcgaacacaaccaacuaaacggcugguccuccgacgaaaacgacuggaacgaaaaacucuaccccgucuggaaacgcggcgacaugcgcuggaaaaacuccuggaaaggcggccgcguacaagccguccucaccuccgacucacccgcccucgucggcucaaacaucaccuucgccgucaaccucaucuucccccgcugccaaaaagaagacgccaacggaaacauagucuacgaaaaaaacugccgcaacgaagccggccucuccgccgaccccuacgucuacaacuggaccgccuggucagaagacucagacggcgaaaacggcaccggccaaucccaccacaacgucuuccccgacggcaaacccuucccacaccaccccggcuggcgccgcuggaacuucaucuacgucuuccacacccucggcuggcuccuacaaacacccaaacuccuacucuaccucucccucaaauuccaaccuucccucuuccuccucuacaacuaa

SEQ ID NO: 4244 - RNA, 2640 nt, Artificial Sequence
  CCDS5600.1 variant
augaagaugcugacccgccuccagguucugaccuuggcccucuucagcaaaggcuuccuguuaucccucggggaccauaauuuccugaggcgcgagaucaagaucgagggagaucugguccucggcggccuguuccccauuaacgagaaggggacgggcacugaggagugcggccggaucaaugaggaucgcgggauccagcggcuggaggccaugcuguuugcgaucgaugagaucaauaaggacgauuacuugcugccgggcguaaagcucggggugcacauccucgacacgugcagccgcgacaccuacgcacuggagcaaucccucgaguucguccgggccucacugaccaagguagacgaggccgaauacaugugccccgacgggucuuacgccauccaggagaacauccccuugcucaucgcggggguuaucgggggcagcuacuccagcgucuccauccaaguggccaaucugcugcgcuuauuccaaaucccccagaucagcuacgccucgaccagcgcaaaacugagugacaagagccgguacgacuacuucgcgcggacaguuccgcccgacuucuaucaggcgaaggccauggcagagauccugcgguucuucaacuggaccuacgucuccacuguggccagcgaaggggacuacggcgagacggggaucgaggcguucgagcaggaggcccgccuccggaauaucugcaucgccacggccgaaaaggugggccgcucaaacauccgcaagagcuacgacucugucauccgggagcuccugcagaaacccaacgcacgggugguuguccucuucaugaggagugacgacucucgugagcugaucgcggccgccucccgcgccaacgccagcuucaccuggguggccuccgacggcuggggcgcgcaggagagcaucaucaagggguccgaacacguggccuacggggcuauaacacuggagcuggccagccagcccguucggcaguucgauagauacuuucagucccugaacccguauaacaaccaccgaaacccaugguuccgggacuucugggaacagaaguuccagugcagccuccaaaacaagcgcaaccaccggcgcgugugcgacaagcaccucgccaucgauuccucaaacuacgagcaggaaaguaagauaauguucguggucaacgccguguacgccauggcccacgcgcugcacaagaugcagcggacccuuugccccaacacuaccaagcucugcgacgccaugaaaauccuggacggcaagaaacuguacaaggacuaccuccugaagaucaacuucacggcucccuucaacccuaacaaggacgccgacucuaucgugaaguucgacacauucggggacggcaugggccgcuacaacgucuucaauuuucaaaacgucgggggcaaauacuccuaccugaaagucggucacugggccgagacccucagccuggacguaaacuccauccacuggagccggaacuccgugcccacaagccagugcuccgaccccugcgcgcccaacgagaugaagaacaugcagccgggcgacgucugcugcuggaucugcauccccugcgaacccuacgaguaccuggccgacgaguucacuugcauggacugcgggagcggccaguggcccacugcugaccucaccggcugcuacgaccugccggaggauuacauacgcugggaagacgccugggccaucgggcccguaaccaucgcgugccugggcuuuauguguaccugcaugguggucaccguguucaucaagcacaacaauacgccccuggugaaggccagcgggagagaacucugcuacaucuuacuguuuggcgucgggcuauccuacugcaugaccuucuucuucauugccaagcccagcccgguaaucugcgcgcugcgccggcugggcuuaggcuccagcuucgccaucugcuacagcgcucuguugaccaagaccaacugcaucgcgcguaucuuugacggggugaagaacggcgcucagcggcccaaguucaucagccccucaagccaagucuuuauaugcuuaggguugauccuuguucagaucgucauggucuccgucuggcucauucuggaagcccccggcacccgccgguacacgcucgcagagaagcgcgagacggugauucucaaaugcaacgucaaggacagcuccaugcugaucagccugacuuacgacgugauccucguaauacugugcaccguguacgccuucaagacccggaagugcccggagaauuucaacgaggcaaaguuuaucgguuucacgauguacacgacuugcaucaucuggcuggccuuccuccccaucuucuaugugacauccagugacuaccgcgugcagaccaccaccaugugcaucuccgucucacuguccggguucguggugcugggaugccucuucgccccaaagguccacaucauccuguuccagccgcagaagaauguggugacccaccggcugcaccugaaccgguucagcgucucagggacgggcaccaccuacucccagagcuccgcgagcaccuacgugcccaccgucugcaacggucgcgagguccucgacuccacgaccuccuccuuauaa

SEQ ID NO: 4245 - RNA, 1947 nt, Artificial Sequence
  CCDS4977.1 variant
augagccaccacggcggagcacccaaagcaagcacguggguaguggcgagccgacggucaagcacuguaucacgcgccccggagcggcgccccgccgaagaacucaaccgaacaggccccgagggguacuccgucgggagaggaggcagauggcggggcaccagccgcccaccggaagccguggcagcaggacacgaagaacuaccccuaugcuuugcacugaaaucacacuucguaggagccguaauaggacgcggaggcucuaaaaucaagaauauccaaagcacaacaaacacaaccauccagauaauccaagaacaaccggaaucacucguaaaaauauucggaagcaaagccaugcagacgaaagccaaagcggucauagacaacuuugucaaaaagcuagaagaaaacuacaacuccgaaugcgggauagacaccgccuuccaacccuccguaggcaaggacggcaguaccgacaauaacguaguagccggcgaccgaccacuaaucgacugggaccaaauccgcgaagaagggcucaaguggcagaagaccaaaugggcagaccucccucccaucaagaaaaacuucuacaaagaaucaacagcaacaagcgccaugagcaaaguagaagccgacagcuggcgaaaagaaaacuucaacaucacaugggacgaccucaaagacggugaaaaacgccccauccccaauccaacaugcacauucgacgacgccuuccaauguuaccccgaggucauggagaacaucaaaaaggcaggcuuccaaaaacccacccccauacaaucacaagcguggccaauagugcugcaaggcauagaccucaucggcguagcccaaacaggaacaggcaaaacacucugcuaccucaugcccggauucauacaccuagugcuacaaccaucccuaaaaggacaaagaaacaggcccggcaugcuaguccuaacaccaacccgugaacuagcccugcaaguagaaggagaaugcugcaaguacucguacaaaggucuuagaagcguaugcgucuacggcggcggcaaccgagacgaacaaaucgaagaacucaagaaaggaguagacauaaucaucgccacgcccggacgccucaacgaccuccaaaugucgaacuucguaaaccucaaaaacauaaccuaucucguacuagacgaagcagacaaaaugcuggacaugggauucgaaccucaaauaaugaaaauacuacucgacguccgaccugacagacaaaccgucaugacaagcgccacuuggccccacagugugcaccgccuugcgcaaagcuaccuaaaagagcccaugauagucuacgucggcacacucgaccuugucgccgucagcucagucaaacaaaacaucaucgucaccacagaggaggagaaauggagccacaugcaaaccuuccuccagagcauguccagcaccgacaaaguaauaguauucguaagccgaaaagcagucgcagaccaccucuccagcgaccucauacuaggcaacaucagcgucgaaagccuccacggcgacagggagcaacgagaccgggaaaaagcacuagaaaacuucaaaacaggcaaaguaagaauacuaaucgcaaccgaccuggccucacgcggacuagacguccacgacguaacacaugucuacaacuucgacuucccccgaaacauagaagaguacguccacaggaucggacgcacgggacgagccggacgaacaggaguguccauaaccacgcuaacgcgaaacgacuggcgcgucgccucagaacucauaaacauccucgaaagggccaaccaaagcauuccggaagaacucgucucuauggcagagcgauucaaagcacaccaacagaagcgcgagauggaacgcaaaauggaacgcccucaaggacgacccaaaaaguuccacuaa

SEQ ID NO: 4246 - RNA, 1209 nt, Artificial Sequence
  ACD02430 variant
auggcccaaaaagaaggcggccgcaccgucccgugcugcagcagaccaaaggucgcagcccuaacagcgggcacccuccugcuacuaaccgcaaucggcgcagcgagcugggccaucguagcgguccugcuccgauccgaccaagagccacuguaccccguccagguaucaagcgcagacgcccgccuaaugguguucgacaaaacagaaggaaccuggcgccuucuaugcagcucacgaucaaacgcacgaguagccggacucagcugcgaagaaaugggcuuccucagagcccuaacacacagcgaacucgacgucaggaccgcaggcgcgaacggaaccaguggcuucuucugcgucgaugaaggacgacugccccacacacaacgccuacucgaagucauaagcgucugcgacugcccacgcggacgcuuccucgcggccauaugccaagacugcggcagacgcaaacuaccggucgaccgcauagucggaggcagggacacaagccuuggcagauggccauggcaagucucacucagauacgacggagcccaccuaugcggaggcucacuacugagcggggacuggguacugacagcagcccacugcuuccccgaacgcaaccgcgugcucucacgauggcgagucuucgcaggcgcgguagcccaagcaagcccacacggacuucaauuaggaguccaagcagugguauaccacgggggauaccucccauucagagacccaaacucagaagagaacuccaacgauauugcgcucguacaccugagcucgccacuaccacugacagaauacauacaaccaguaugccuaccagcagcaggacaggcccuagucgacggcaaaaucugcaccguaaccggaugggggaacacgcaauacuacggccaacaggccggaguacuacaagaagccagaguaccaaucauauccaacgacgucugcaacggcgccgacuucuacgggaaccagaucaagcccaaaauguucugcgcaggauaccccgaaggcggaauagacgcuugccaaggagacucgggcggacccuucgucugcgaagacaguauaagcagaacccccagauggcgacucugcggaauugugagcuggggcacaggaugcgcacuggcacaaaaaccaggaguauacacgaaaguaagcgacuuuagggaauggaucuuccaauaa

SEQ ID NO: 4247 - RNA, 1254 nt, Artificial Sequence
  AAA36013 variant
auggcccaaaaagaaggaggccgaacagucccaugcuguagccgccccaaagucgccgcacuaaccgccggaacacuacuacuccugacugccaucggagcagcaagcugggccaucguagcaguccuacuaagaagcgaccaagaaccccuauaccccguacaagucucgagcgcagacgcccgccuaaugguauucgacaaaacggaaggaaccuggcgccuacuaugcagcucaaggucaaacgcacgcguggcagggcuaucaugcgaagaaaugggauuccuacgcgcccuaacccacagcgaacucgacguaaggacagcaggcgcaaacgggaccucaggcuucuucugcgucgacgaaggccgccuaccacacacacaacgccuauuagaagucauaagcgucugcgacugcccgcgaggaagauuccucgcagcaauaugccaagacugcggcagacgaaagcucccagucgaccggauagucgggggccgggacaccagccuaggaagauggccauggcaagucucccucagguacgauggcgcgcaccucugcggaggcucacuacuaagcggagacuggguacuaaccgccgcccacugcuuccccgagagaaaccgcguacuaucccgauggcgaguauucgccggcgcagucgcgcaggcaagcccacacggacuccagcucggcguccaagccguagucuaccacgggggcuaccuccccuucagagacccaaacucagaagaaaacucaaacgacaucgcccuaguccacuuaagcucgccucucccccuaacagaauacauccaaccagucugccuaccagcagcaggccaagcacucguugauggcaaaaucugcacugugaccggauggggaaacacccaauacuacggccaacaagccggaguacugcaagaagcccgcguaccuaucauaagcaacgacguaugcaacggcgccgacuucuacggaaaccaaaucaaaccaaaaauguucugcgcagguuaccccgaaggaggaaucgacgccugccaaggagacucaggaggcccauucgucugcgaagacuccauaagcagaaccccacgcuggagacucugcggaaucguaagcuggggaacaggaugcgcccucgcccaaaaaccgggcgucuacacaaaaguaagcgacuuccgcgaauggauauuccaagcaaucaaaacacacagcgaagcaucaggcauggucacacaacuguaa

SEQ ID NO: 4248 - RNA, 2940 nt, Artificial Sequence
  BAG62073 variant
auggaacuagccgcucucugccgauggggccucuuacuugcacuccucccuccaggugccgcaucaacacaggacaacuaccucagcacagacguaggauccugcacgcuuguuugcccccuccacaaccaggaagucacagcagaggauggcacccaacggugcgaaaaauguuccaaacccugcgcacgcgucugcuacggauuaggcauggaacaccuccgggaggucagagcagucaccuccgccaacauacaagaguucgcaggaugcaaaaagaucuucggcagccucgcauuccuuccagaauccuucgacggggaucccgcaagcaacacagcaccucuacagcccgaacaacuccaaguauucgaaacacucgaagaaauaacaggauaccuguacauaucagcuuggccagauucacucccagaccuaagugucuuccagaaccuacaggucauaaggggccgcauccuacacaacggagccuacucccuuacacuccaaggccuagggaucuccuggcuaggauuacgcagccuccgcgaacugggaagcggacuagcauuaauacaucacaacacacacuuaugcuucguccacaccguuccaugggaccaacucuuccgcaacccccaccaggcccuccuccacacugccaauagaccagaagacgaaugcgucggagaggggcucgccugccaucaauugugcgccagaggccacugcuggggcccaggccccacucaauguguaaacugcucccaauuccuucgcggccaggaaugcguggaggagugcagaguacugcaaggcuuaccgcgagaauacgucaaugccagacacugccugccuugccaccccgaaugccaaccccaaaacggaucaguuacaugcuucggcccagaagccgaucagugcgucgcaugcgcccacuacaaagauccaccauucugcguagcacgcugcccaagcggagugaaacccgaccuauccuauaugcccaucuggaaauuccccgacgaagaaggcgccugccaacccugccccaucaacugcacacacuccugugucgaccuagacgacaaagggugcccggcggaacagcgcgcaagcccucuaaccuccauaaucuccgccgucgucggcauccuacucguagucguccucgggguggucuucggaauacucaucaaacgacgccaacagaaaauacgaaaauacacuaugcgacgccuacuacaagaaacagaacucgucgaaccccugaccccaagcggggcgaugcccaaccaagcgcaaaugcgaauacuaaaagaaaccgaacuacgcaaaguaaagguccuaggcucaggugccuucgguaccguauacaaaggcauuuggaucccagauggcgagaacgucaaaauccccgucgccauaaaaguacuccgcgaaaacacaucuccaaaggcaaacaaagaaauccucgacgaggcauacgucauggccggcguaggcagcccuuacgucucaagacuacucggcauaugucugaccucaaccgugcagcuagucacacaacuaaugcccuacggcugccuacucgaccacgucagagagaaccgaggaaggcuaggaucacaagaccuucucaacuggugcaugcaaauagccaaaggcauguccuaccucgaagacguccgucuaguccacagagaccuggcagcuaggaacgugcucgucaaaucaccgaaccacgucaaaauaacagauuuuggacucgcacgacuacucgacauagacgaaaccgaauaccaugcagauggaggaaagguucccaucaaguggauggcccuagaauccauacuacgacgacgauucacacaccaauccgacgucuggucuuacgguguaaccgucugggagcucaugaccuucggugcuaaacccuaugauggcauucccgcuagagaaauaccagaccuacucgaaaaaggugagcgacuaccccagccaccuaucugcacaauagaugucuacaugauaauggucaaaugcuggaugauagacagcgaaugucggccccgcuuucgcgagcucgucuccgaguucucccgaauggcccgcgacccacaacgcuucgucgugauccaaaacgaagaccuaggcccggccucaccccuggacuccacuuucuaccgcucgcuccuugaagacgaugacaugggagaccuaguggacgccgaagaauaucucgucccacagcagggcuucuucugccccgauccagcccccggcgcaggcggcaugguacaccaccgacaccgcagcucgagcacacgcucaggaggaggagaucuuacacuuggacucgaaccgucagaagaagaggcccccaggucaccacucgcaccaucggaaggagccggaagcgacguauucgacggggaccuaggaaugggcgccgcaaaaggacuacaaucccuaccuacacacgacccaagcccgcugcaacgcuauagcgaagacccgaccguaccccuacccucggaaacggacggguacgucgcaccccuaacgugcuccccacaaccagaauacgugaaucaaccggacguccgcccucaaccacccagcccccgcgaaggcccccuaccagccgcaagacccgccggagccacccucgaacguccaaaaacccucucacccggcaaaaacggaguugucaaagacguauuugccuucggaggagccgucgaaaaccccgaguaccuaacaccccaaggaggggccgcgccacaaccacaucccccacccgcuuucagucccgcauucgacaaccuauacuacugggaccaagacccacccgaaaggggcgcaccacccucaaccuucaaaggcacucccaccgccgagaaccccgaauaccucggacucgacguccccgucuga

SEQ ID NO: 4249 - RNA, 264 nt, Artificial Sequence
  CCQ43016 variant
augaugcgcaugaaaaccuucgucaugauccacuuccaccucaugaacggcggcaaagccaaacucuacucccgcccccacgccaaacuccuccccgaacaacgcgucaccgacaaaaccggcgcccccgucgaauggcccggccaaacccaaugcuccaccgaaacccaaacccucgccgccaugcccgcccaagccgucaugcgcgucaccugcaccgucgucgacaugcacaaauccgaaugcgcccccgcccaaaccuaa

SEQ ID NO: 4250 - RNA, 3768 nt, Artificial Sequence
  AAI67147 variant
auggaacuagcagcccucugucgcuggggacugcuccucgcacuauugcccccaggagcggcaagcacucaagucugcaccggcaccgauaugaaacuacgguugcccgccagucccgagacccaccuugacaugcuccgccaucucuaucaaggcugccaagugguucaagguaaccuagaacugacuuacuuacccacaaacgcgucccugagcuuccuccaagacauucaagaaguacaaggauacguuuuaaucgcccacaaucaaguccgucaaguaccauuacaaagacuacggaucguuaggggaacacaacuauucgaagacaacuacgcacucgcaguccucgacaauggggacccacuaaacaacaccacaccagucacaggagccagccccggcggacuccgagaacuacaauuaagaucccuaacugaaauacucaagggaggcguucugauccaacgcaacccacaacugugcuaccaagacaccauccucuggaaagacaucuuccauaaaaacaaccagcucgcauuaacccucaucgauacaaaccgaucaagagcaugucaccccugcagccccaugugcaaaggcucccgcugcuggggagaguccucugaagacugccaaucccugacgcgcacagugugcgcagggggcugcgcacgaugcaaaggaccacuuccaaccgauugcugccacgaacaaugcgcagcgggauguacaggucccaaacacagcgacugccuagcaugccuccacuucaaucauucagguauuugcgaauuacacugccccgcccucguaacguacaacacagacaccuuugaaagcaugccaaacccagagggccgcuauaccuucggugccuccugcgucacugcuugcccauacaacuaccugucuaccgacguaggaaguugcacccuaguaugcccccuucacaaccaggaaguaaccgcagaagacggcacacaacguugcgagaaaugcaguaaaccaugcgcacgcgucugcuacggccuaggcauggagcaccuacgugaaguacgugcaguaacuagcgccaacauacaagaguucgccggaugcaagaaaaucuucggaucgcuagcauuccuaccugagucauucgacggagacccugcaucaaauacagcaccacuucagcccgaacaacuccagguauucgaaacccucgaagaaauaaccgguuauuuauacauaagcgccuggccagacucacuacccgaccuaucagucuuucaaaaccuacagguaaucagagguagaauacuucacaauggagccuacucauuaacccuacaaggccuuggcaucucaugguugggcuuacgaucgcuccgagaacuaggcucgggccuagcacucauccaccacaacacccaccuuuguuuuguccacaccguuccaugggaccaacuauuucgcaacccccaccaagcgcuccuccauacagcaaaccgcccagaagacgaaugcguaggagaagggcucgcuugccaccagcuaugcgcucggggccacugcuggggccccggcccgacacaaugcguaaacugcucacaauuccuccgcggacaggagugcguagaagagugccgcguccuucaaggucucccccgcgaauacgucaacgcucgccacugccuucccugucacccagaaugccaaccccaaaacggcucagugacauguuucggcccggaagcagaccagugcguagcaugugcccacuauaaagacccaccauuuugcguggcccgcugcccaucaggcguaaaaccagaccuaucauacaugccaaucuggaaauucccggacgaggaaggggcgugccaacccugucccauuaacugcacgcacuccuguguagaucuggaugacaaaggcugccccgcugaacaacgugccagcccccucacaucgaucauauccgccguagucggcauccuucuaguaguagugcuaggagucguauuuggcauccucauaaaacgacggcaacagaaaauccgaaaauacacuaugcgccgacugcuccaggaaacggagcuagucgaaccccucacaccuucaggcgcaaugcccaaccaggcacaaaugcgaauacucaaagaaacagaacuccguaaagugaaaguacuugggucgggagccuucggcacaguuuacaaaggcaucuggaucccugacggagaaaacgucaaaauaccugucgccauuaaaguacugcgagaaaacaccagcccuaaagccaacaaagaaauccucgacgaagcauacguuauggcgggcgucggcagcccauacgucucucgucuccuaggaaucugucucaccucaacaguucagcuaguaacucaacuaaugccuuacggcugccuccucgaccauguacgcgaaaaccguggccgccucggaucccaagaucucuugaacuggugcaugcaaauagccaaaggaaugucuuaccucgaagacgucagacucguccaccgugaucucgcagcucgcaacguccucguaaaauccccuaaccaugucaaaaucaccgauuucggccucgcccgccuccuggauaucgacgaaaccgaauaccacgcagacggggguaagguacccauaaaauggauggcccucgaaagcauacuaagacgccgcuucacucaucaauccgauguuugguccuacggcgucacaguaugggaacuuaugaccuucggugcgaaacccuaugacggaaucccagcgcgugaaauccccgaccuccucgaaaaaggagaacgccuaccgcaaccgccgaucuguacaauagaugucuacaugaucaugguaaaaugcuggaugauagacuccgagugcagaccccgcuuucgcgagcuaguuuccgaguucucccgaauggcccgugacccccaaagauucguagucauccaaaacgaagaccucggcccagccuccccucuggacaguaccuucuaccgauccuuacuagaagaugaugacaugggcgaccucguagacgccgaagaauaccuugucccccagcaaggauucuuuugccccgaccccgcgcccggcgcaggaggcaugguacaccaucgucacagaucuagcucgacuaggucaggcggcggcgaccucacucuuggccuagaacccucggaagaagaggccccacgcagcccguuagcaccauccgaaggcgccggcucugacguauucgacggagaccuaggaaugggugccgccaaaggucuccaaucgcuuccgacccacgauccaagcccccuacaaagauacucagaggacccgacugucccccuaccguccgaaacagacggcuaugucgcgccccuaacuugcucaccucaacccgaauacguaaaccaaccugacguucgcccccaacccccaucgccgagagagggaccccuaccugccgcccgccccgccggcgcaacgcucgagcgccccaagacacucucccccggcaaaaacggcgucgucaaagacgucuuugccuucggcggcgcuguggagaacccggaauaccuaacaccucagggcggugccgcuccccaaccucacccaccuccggcuuucagccccgcauucgauaaccucuacuauugggaccaggacccacccgaacgaggagcacccccuucaacguucaaagggaccccgacugccgaaaacccagaauaccucggcuuagacgugccaguauaa

SEQ ID NO: 4251 - RNA, 1260 nt, Artificial Sequence
  AAD56009 variant
auggaacuagccgcccucugccgauggggacuacuccucgcccuccuacccccaggagccgccuccacacaagucugcaccggcaccgacaugaaacuccgccuacccgcaucaccagaaacacaccuugacaugcuccgccaccucuaccaaggcugccaaguaguacaaggcaaccuugaacucaccuaccuaccgaccaacgccucacucuccuuccuccaagacauccaagaaguacaaggauacguccucauagcccacaaccaaguccgccaagucccccuccaacgacuacgcauaguccgcggcacccaacucuucgaagacaacuacgcccucgcaguccuagacaauggcgacccccuaaacaacaccacaccagucaccggagccucccccggcggccuccgcgaacuacaacuaagaucacuaacagaaauccucaaaggaggcguccucauacaacgcaacccccaacucugcuaccaggacaccauccucuggaaagacaucuuccacaaaaacaaccaacuugcccucacccuaaucgacaccaaccgcucacgagccugccauccaugcucacccaugugcaagggaucccgcugcuggggcgaauccuccgaagacugccaaucccuaacacgcaccgucugcgccggaggcugcgcccgauguaaaggcccgcuccccaccgacugcugccacgaacaaugcgcggccggcugcacuggccccaaacacuccgacugccuagcaugucuacacuucaaccacuccggcaucugcgaacuccacugcccugcccuaguaaccuacaacaccgacaccuucgaauccaugcccaacccagagggccgcuacaccuucggcgcaucaugcguaaccgccugccccuacaacuaucucuccaccgacgucggcuccugcacacucgucugcccccuccacaaccaagaagucacugcagaggacggaacccaacgcugcgaaaaaugcuccaagccaugcgcaagaggcacacauucacucccuccucgucccgccgcagucccugucccccuccgcaugcaaccuggcccagcacaccccguccucagcuuccuccgacccucaugggaccuagucuccgcauucuacucacuaccccucgccccacucucccccacuuccguccccaucucccccgucucuguaggucgaggacccgacccagacgcccacguagcaguagaccucucccgcuacgaaggcuaa

SEQ ID NO: 4252 - RNA, 546 nt, Artificial Sequence
  U70863.1 variant
ggcucccacucgaugagguacuucuucacaagcgugagcaggccagggcgcggggaaccacgcuucaucgcggucggauacguggacgacacccaguucgugcgauucgacucggacgcggccucgcaaaggauggagcccagagccccguggauagaacaggaaggacccgaguacugggacggggaaacgcgaaagguaaaggcccacagccaaacccaccgcguggaccugggcacgcucagaggauacuacaaccaaucggaagcaggcucgcacacaguccagcgaauguacgggugcgacgucgggagcgacuggagguuccuacgcggauaccaccaauacgccuacgacgggaaagacuacauagcccugaaagaggaccugcgcucguggacagccgcggacauggccgcgcaaacgacaaagcacaagugggagacagcgcacguggccgagcaacugcgcgcguaccuggaagggaccugcgucgaauggcuaagaagauaccuagaaaacggcaaggaaacacuccagcgaacg

SEQ ID NO: 4253 - RNA, 543 nt, Artificial Sequence
  AH009136.2 variant
ucgcacucgaugagauacuuuuucacgagcgugagcaggcccgggcgcggggaaccgcgcuuuaucgcggucggguacguagacgauacccaguucgugcgauuugacucggacgcggccucgcaaaggauggagcccagagccccguggauagaacaggaagggcccgaguacugggacggggaaacgcgcaaggucaaggcccauagccagacccauagaguggacuugggcacgcucaggggcuauuacaaccaaucggaagcaggaucgcacacgguacagcgcauguacgggugcgaugucgggagcgauuggagguucuugcgcggguaccaccaauaugccuaugacgggaaagauuacauagcccugaaagaggaccugcgcucguggacggccgcggacauggccgcgcaaacgaccaagcacaagugggaggccgcgcacguagccgagcaacugcgagcguaccuggaagggaccugcgucgagugguugcgcagguaccuggaaaauggcaaggaaacgcuccagcgcacg

SEQ ID NO: 4254 - RNA, 705 nt, Artificial Sequence
  AAG09781 variant
augcuccgcguccccgaaccccgccccggcgaggccaaagcagaaggcgcagccccacccacccccuccaaaccccucaccuccuuccucauccaagacauacuccgcgacggcgcacaacgccaaggaggccgcaccucaucccaacgccaacgcgacccagaacccgaacccgaaccagaacccgaaggcggacgcucccgcgccggagcacaaaacgaccaacucuccacuggaccccgcgccgcccccgaagaagcagaaacccucgccgaaacagaacccgaacgccaccuaggcuccuaccuacucgacuccgaaaacaccucaggcgcccucccccgacuaccacaaacccccaaacaaccacaaaaacgcucccgcgccgcauucucacacacccaagucauagaacucgaacgaaaauucucccaccaaaaauaccuauccgcccccgaacgcgcccaccucgccaaaaaccucaaacucaccgaaacccaagucaaaaucugguuccaaaaccgacgcuacaaaacaaaacgaaaacaacucucuucagaacucggcgaccucgaaaaacacuccucccucccagcacucaaagaagaagccuucuccagagccagccucgucuccgucuacaacuccuacccuuacuaccccuaccuauacugcgucggcuccuggucccccgccuucugguaa

SEQ ID NO: 4255 - RNA, 942 nt, Artificial Sequence
  BAG37303 variant
auggcaucauuccgcaaacuaacccucagcgaaaaaguccccccaaaccaccccagccgcaaaaaagucaacuuccucgacaugucccucgacgacaucaucauauacaaagagcucgaaggcaccaacgccgaagaagaaaaaaacaagagacaaaaccacuccaaaaaagaaucacccucccgacaacaaucaaaagcccaccgacaccgccaccgccgcgauuacucccgcugccgcuccaacagcgaagagggcaaccacgacaaaaaacccucacagaagccaucagguuucaaaagcggucaacacccccucaauggccaaccccuaaucgaacaagaaaaaugcagcgacaacuacgaagcccaagccgaaaaaaaccagggccaaucagaaggcaaccaacaccaauccgaaggcaacccagacaaaucagaagaaucccaaggccaacccgaagaaaaccaccacuccgaaagaucccgcaaccaccucgaacgcucccuaagccaauccgaccgaucccaaggccaacuaaaacgacaccacccacaauacgaacgcucacacggacaauacaaacgcucccacggccaauccgaacgcucccacggccacucagagcgcucccacggccacucugaacgcagccacggucacuccgaacgaucacacggccacuccaaacguucccgcucccaaggcgaucuagucgacacccaauccgaccuaaucgcaacccaaagagaccuaauugcuacccaaaaagaccuaaucgccacccaacgagaccucaucgccacccaacgagaccucaucgucacacaacgagaccucgucgcaaccgaacgcgaccuaaucaaccaaucaggacgcucccacggccaauccgaacgccaccaacgauacucaaccgguaaaaacaccaucaccaccuaa

SEQ ID NO: 4256 - RNA, 942 nt, Artificial Sequence
  AAI28135 variant
auggcauccuuccgcaaacucacccuaucagaaaaaguccccccaaaccaccccucccgcaaaaaaguaaacuuccuagacaugucccucgacgacaucauaaucuacaaagaacucgaaggaaccaacgccgaagaagaaaaaaacaagcgccaaaaccacagcaaaaaagaaucccccucacgacaacaaucaaaagcccaccgucaccgacaccgccgcggcuacuccagaugcagaagcaacuccgaagaaggcaaccacgacaaaaaacccucccaaaaaccuuccggcuucaaauccggacaacacccccucaacggacaaccccucaucgaacaagaaaaaugcucagacaacuacgaagcacaagccgaaaaaaaccaaggccaaucagaaggcaaucaacaccaauccgaaggcaaccccgacaaauccgaagagucccaaggacaacccgaagaaaaccaccacuccgaacguucccgcaaccaccucgaacgcucccucagccaauccgaccgcucacaaggccaacucaaacgucaccacccacaauacgaacgcucccacggccaauacaaacgcucccacggccaaucagaacgcucacacggccacuccgaacgcucccacggccauuccgaacgaucacacggucacuccgaacgaucccacggccacagcaaacgaucccgaucacaaggagaccucgucgacacacaauccgaccucauagcaacucaacgagaccucaucgccacccaaaaagaccucaucgcaacacaacgcgaccucaucgcaacccagagagaccucaucgucacacaacgagaccucgucgccaccgaacgcgaccucaucaaccaauccggccgcucacacggacaauccgaacgacaccaacgcuacuccaccgguaaaaacaccauuaccaccuaa

SEQ ID NO: 4257 - RNA, 384 nt, Artificial Sequence
  12543784 variant
augaucaaaaaaaaccucaaaaaacucggcaucgaagaaaccuaccucaacaucaucaaagccaucuacgaccgccccaccgccuccauacaaaaaaccgaaaaccucuccaccaaaaccggcaccucccaagaauaccaccucuccccccucugguucuacaucguccucgaaauccucgccuccaccauccgccaagaaaaaaaccuaaaagacauccacaccgaaaaagaagaagucaaacucucccucuucgccgacgccaugauccucuaccucaaaaaacccaacgacuccacccgcaaacuccucgaacucaucaaaaaaauccacucauccugccgcaucaaaaucaacauccacuucgccuucugcucccaauaa

SEQ ID NO: 4258 - RNA, 1926 nt, Artificial Sequence
  AAA63226 variant
auggcaaaagcggccgcaaucgggaucgaccuagggaccacauacucaugcguaggcguguuccaacacggcaaaguagaaauaauagcaaacgaccaaggaaaccgaaccaccccaucauacguggccuucacggacaccgaaagacuaauaggggacgcagccaagaaccaggucgcgcucaacccacaaaacacggucuuugacgccaaacgacuaauaggcagaaaauucggcgacccaguaguccagagcgauaugaagcacuggccauuccaagucaucaacgacggggacaaacccaagguccaaguaucguacaagggcgagaccaaggccuucuacccggaagaaaucucgagcaugguccugacaaaaaugaaggagaucgccgaggccuaccucggguacccaguaacaaacgcagucauaaccguucccgccuacuucaacgacagucagcgacaggcaacaaaagacgcaggggucauagccgggcuaaacguccuccgaauaaucaacgaaccaacagccgccgcgaucgcauacggacucgaccgaacgggaaaaggagagcgcaacgucuugauauuugacuuaggaggcggcacauucgaugucucaauccucacaauagacgauggaaucuucgaagucaaagccacagccggcgacacccaucugggcggggaagacuucgacaacagacucguaaaccacuucguugaggaguucaagagaaagcacaagaaagacaucucacaaaacaaacgggccguacgcagacucagaaccgcaugcgagcgcgccaaaaggacccuaagcucgagcacgcaagcaaguuuagaaauagacucgcuauucgaggggauagacuucuacaccucaauaacaagagcacgcuucgaagaacuauguagcgaccucuuccgcucaacccucgaaccggucgaaaaagcguuaagagacgcgaaacuggacaaagcccagauccaugaccugguacuggucgggggaucaaccagaaucccgaaagugcaaaagcuccugcaagacuucuucaacggacgagaccuuaacaaaucaaucaaccccgacgaggcaguagcguacggagccgcaguacaagccgcaauccuuaugggagacaaauccgaaaacguacaagaccuauugcuacuagacguagcaccucuaucccuagggcuagaaaccgcaggaggagucaugaccgcacuaauaaaaaggaacucgacaauaccaacaaaacaaacccagaucuucaccaccuacucggacaaccaaccaggcguccucauccaaguauacgaaggcgagcgcgccaugacaaaagacaacaaccuccuaggacgguucgagcuauccggaauaccacccgcuccccgaggagucccccaaaucgaagugaccuucgacauagacgcgaacggaauccuaaacgugacagcgaccgacaaaucgaccggaaaagcgaauaaaaucacgauaacaaacgacaaggggcgauuauccaaggaagaaauagaacgaaugguccaagaagcagaaaaauacaaggccgaagacgagguccagcgagaacgaguuagcgcgaaaaacgcacuggaaucauacgccuucaacaugaaaagcgcggucgaggacgaaggccugaaaggaaaaaucuccgaagcagacaaaaagaaaguccuagacaaaugccaagaggucaucagcuggcuagacgccaacacacucgcugaaaaagaugaguucgaacauaaaagaaaagaacuagaacaggucugcaaccccauaauuaguggacuguaccaaggcgcaggaggccccggccccggaggcuucggcgcacaaggaccaaaaggcggaagcggauccggccccaccaucgaagaaguggacuag

SEQ ID NO: 4259 - RNA, 1926 nt, Artificial Sequence
  AAA63227 variant
auggccaaagcggcagcaauagggaucgaccuugguaccacguacucgugcgugggcguguuccagcacgggaaaguagagauaaucgcgaacgaucaaggaaacaggaccacgcccucauacguggccuucacagacacagaacgacugauaggagacgccgcaaagaaccagguagcccuaaacccccaaaacacugucuucgacgcaaaaaggcuaaucggaagaaaauucggagacccagugguacagagcgauaugaagcacuggcccuuccaaguuauaaacgacggagacaaacccaaaguccagguauccuacaaaggagaaaccaaagccuucuacccggaagagaucucgagcaugguccugacaaaaaugaaagaaaucgccgaggccuaccucggauacccggucacaaacgcggugaucaccgugcccgcauacuucaacgacagccagcgccaggcuacgaaggaugcuggagucaucgccgggcuaaacguccuacgcauaaucaacgaaccaaccgcggccgcaaucgcguacggccuggaucgaacaggcaaaggagagagaaacguacuaaucuucgaccuggguggcgggacauucgacguaucgauccuaacaauagacgacgggaucuucgagguaaaggccacggccggagacacacaccugggcggcgaagacuucgacaacaggcucgugaaccacuuuguagaagaguucaagcgcaagcacaagaaagacaucucacaaaacaaaagagcaguacgccgacucagaacagcaugcgagagagcaaaaaggacccuaaguuccagcacacaagcaagccuagaaauagacagucucuuugaaggaaucgacuucuacacaucaauaacgagagcgagauucgaggaacucugcagcgaccuauuccgauccacucuagaaccggucgagaaagcccuaagagacgcgaaauuggacaaggcccagauucaugaccuagugcugguaggaggcagcacccggaucccgaaaguacaaaaacuucuacaagacuucuucaacgggcgggaccuaaacaaaucgaucaaccccgaugaagcagucgcguacggggcagcgguacaagccgcgauacuaaugggagacaagagcgagaauguacaggaucuacucuuacuggacguagccccgcucucacuaggacucgagaccgcgggcggggugaugacagcgcucauaaagagaaacuccacaauacccacgaaacagacccaaaucuucaccacguacucagacaaccaaccgggcguacuaauccaaguguacgagggcgaacgggcgaugacgaaagacaacaaccuccucggcagguucgaacuuucgggcauaccaccggccccacgcggggucccacaaauagaagugaccuucgacauugacgcaaacgggauacucaacgugaccgcgaccgacaaaagcacaggaaaagcgaacaagaucacgauaacaaacgauaaaggccgccuaagcaaagaggagaucgaacgaauggugcaagaagcggaaaaguacaaagcagaggacgagguacagcgcgaacgaguaagcgcgaaaaacgcacuagaaucguacgcguucaacaugaaguccgcaguagaggaugagggccuaaaagggaaaauaagcgaagccgauaaaaagaaagugcucgacaaaugccaggagguuauaagcuggcuagacgcuaacacccuagccgaaaaagacgaguucgaacacaaaaggaaagagcucgaacaagugugcaaccccauaauuucgggccuauaccaaggcgcgggagggccugggccagggggcuuuggcgcgcaaggaccaaagggcggaagcggaagcggaccuacgauagaggaaguggacuag

SEQ ID NO: 4260 - RNA, 627 nt, Artificial Sequence
  AAI21098 variant
auggcccucggccaaaaacucuucaucaccaugucacgcggcgccggccgacuccaaggaacccucugggcccucgucuuccucggcauccucgucggcauggucguccccagccccgcaggaacccgagccaacaacacccugcucgacucccgcggcuggggcacccuucuaagccgcucccgcgccggccucgccggcgaaaucgccggcguaaacugggaauccggcuaccucgucggcaucaaacgccaacgacgccuauacugcaacgucggcaucggauuccaccuacaaguccuacccgacggccgcaucuccggcacacacgaagaaaaccccuacucccuccucgaaaucuccacagucgaacgcggcgucgucucacucuucggcguccgcagcgcccucuucgucgcaaugaacucaaaaggccgccucuacgccacccccucauuccaagaagaaugcaaauuccgcgaaacccuccuacccaacaacuacaacgccuacgaauccgaccucuaccaaggcaccuacaucgcccucucaaaauacggccgagucaaacgaggcuccaaagucuccccaaucaugaccgucacccacuuccucccacgaaucuaa

SEQ ID NO: 4261 - RNA, 1569 nt, Artificial Sequence
  BAA74724 variant
augccaagagcacccagaugucgugcgguacgaucacuucucagaucccacuaccgcgaaguacucccacucgccaccuucguccgccgacucggaccacaaggguggcgccucguacaacgcggagaccccgccgccuuccgcgcccuugucgcacaaugucucgucuguguaccuugggaugcacgacccccccccgccgccccaucauuccgccaaguuucaugccucaaagaacucguagccagaguccuucaacgucuuugcgaacgcggagccaaaaacguacuagcuuucggcuucgcccuacuagacggcgcacguggcggcccacccgaagccuucaccacuuccguccgaucauaccuaccaaacacagucacggacgcacuccgaggaucuggagccuggggacuccuacuccguagagucggagacgacguacuuguccacuuacucgcccgcugcgcccucuucguccuuguagcacccucaugcgccuaccaagucugcggaccaccucucuaccaacuaggcgcagcaacccaagcacgaccccccccccacgcauccgguccccgccgccgccucggcugcgaacgagcauggaaccacuccguccgugaggcuggugucccccucggccucccagcaccaggcgcgcgccgccgcggaggcuccgcuucaagaucauuaccacucccaaaacgcccacgccgcggcgccgcccccgaacccgaacgaaccccaguaggccaaggauccugggcucacccuggcagaacuagaggccccuccgacagaggcuucugcgucguaucccccgcccgcccagccgaagaagccaccucacucgaaggcgcccuguccgguacuagacacucacaccccucaguuggacgccaacaccaugcuggcccuccaucaacuuccagaccaccgcgccccugggacacccccugccccccaguauacgccgaaaccaaacacuuccuauauucaucaggcgacaaagaacaacucagacccuccuuccuccuuuccagucuacgccccauacucaccggcgcccgucgccucguagaaaccauauuccucggaucaucccccggaugccaaggccucccugcaggcugucccgccugucccucagccaccggaaaaugcggccccugcuucugguccugcuuaggaaccacccguuccgcaccaaccgggugcucaucccgacgcacggccagaugcgaacuacgauccccucaacaacccgucuccguacccggacgcucuccccgcgcacucuggcgcccaccccgccgccgcacacaaaccccggucgccuggugcucauguuccgccuccacagcaccccuagccggaguacgacucagagcaggacuucccgcuccagccggcgccccaagaccccucggccuacaagcccaaagacgacgcuuccuacgaaacaccaaaaaauuuaucagccucggaaaacacgcaaaacuaucccuccaagaacucaccuggaaaauguccguccgagacugcgccuggcuacgucgaucaccc

SEQ ID NO: 4262 - RNA, 1680 nt, Artificial Sequence
  BAA23606 variant
augcgacuacaccgacuccgagcacgccucucagccgucgcaugcggccuacuccuccuccucguccgcggccaaggccaagauuccgccagcccuauccgcaccacucacacaggccaaguccucggcucccucguccacguuaaaggcgcaaacgcaggcguacagaccuuccucggcauacccuucgccaaaccaccacucggcccacuacgcuucgccccacccgaaccacccgagucaugguccggcguacgcgacggaaccacccaccccgccaugugccuucaagaccucaccgccguagaaagcgaguuccucucacaauucaacaugacauuccccagcgacuccauguccgaagacugccucuaccuuuccaucuacacccccgcacacucccacgaaggauccaaccuccccgucauggucuggauucacgguggcgcccucguuuucggcauggcaucacucuacgacggauccaugcucgcagcccuggaaaaugucgucgucgucaucauccaauaccgccucggcguccucggguucuucucaaccggcgacaaacacgcaaccggcaacuggggauaccuagaccaaguugcagcgcuccgcuggguccaacagaacauagcccacuucggcggaaaccccgaccgagucaccaucuucggcgaaagcgccggcggcaccuccguaucuuccuuaguaguaucccccauaagccaaggacuauuccacggcgcuaucauggaaagcggaguagcccuucuccccggacuaaucgcauccagcgcagacgucauuucuacagucgucgccaaccucuccgccugcgaccaagucgacucggaagcccuagucggcugccugcgcggaaaaucuaaagaagaaauccucgcaauaaacaagcccuucaaaaugaucccaggcgucgucgacggcgucuuccucccccgacacccccaggaacuccuugcaucggccgacuuccaacccgucccaagcauugucggcguaaacaacaacgaauuuggcuggcucauccccaaaguaaugcgaauauaugacacccaaaaagaaauggaccgcgaggcuucacaggccgcccuacagaaaaugcugacccuccucaugcuaccucccaccuucggagaccuacuuagagaagaauacaucggugacaacggcgacccccaaacccuccaagcacaauuccaagaaaugauggccgacuccauguucgucauacccgcacuccaagucgcacacuuccaaugcucccgcgcacccgucuacuucuacgaguuccaacaccaacccucguggcucaaaaacauccgcccaccgcacaugaaagccgaucacggagacgaauuaccuuucgucuuccgcuccuucuucggcggcaacuacaucaaauucaccgaagaagaagaacaacucucacgaaaaaugaugaaauacugggccaauuucgcacgcaacggcaaccccaacggugaaggacuuccucacuggccacuauucgaccaagaggaacaauaccuccaauuaaaccuucaacccgccgucggacgagcccuaaaggcacaccgacuccaauucuggaaaaaggcacucccccaaaagauccaagaacuagaagaaccggaagaacgucacacugaacucuaa

SEQ ID NO: 4263 - RNA, 1740 nt, Artificial Sequence
  AAH65269 variant
augaacaaacucuacauaggcaaccuuucagaaaacgcagcccccucagaccucgaauccaucuucaaagacgccaaaauaccaguaucggguccauuccucguaaaaacaggauacgcuuucguagacugcccagacgaaucaugggcacucaaagccaucgaagcacucucaggcaaaaucgagcuacacggcaagcccaucgagguggaacacuccgugcccaaacgccaacgaauccgcaaacuacaaauccgcaacauuccaccccaccuccaaugggaaguccuugauagccuccuaguacaauacggcgugguagagagcugcgaacaaguuaacaccgauagcgaaacagcgguagucaacgucaccuacuccuccaaggaccaagcccgccaagcacuugacaaacuuaauggcuuccaacuagaaaacuucacgcuuaaggucgccuacauacccgacgagauggccgcacaacagaacccccuccaacaaccccgcggucgucgaggccuaggccaacguggcagcucacgacaaggcucacccggauccgucuccaagcaaaaaccaugcgaccucccccuucgacuccucguacccacccaauucgucggagccaucauuggaaaagagggcgcaaccauacgcaacaucaccaaacaaacccaauccaaaaucgacguccaccgcaaggaaaacgccggcgcugcugaaaaauccaucaccauacuuucaacccccgaaggcaccucggcagccuguaaaagcauccuagaaaucaugcacaaggaagcccaagacaucaaauucacagaagaaaucccacuaaaaauccuggcccauaacaacuucgucgguagacucauuggcaaagaaggccgaaaccucaagaaaauagaacaagacaccgauaccaaaaucaccaucagcccgcuacaagaacuaacacuuuacaacccagaacgaaccaucacugucaaaggcaacgucgagaccugcgccaaagcagaagaggagaucaugaagaaaauacgcgaauccuacgaaaacgacaucgccagcaugaaucuacaagcccaccugauccccggccuaaaccucaacgcacucggccuguuucccccuaccucaggcaugccaccgcccacaagcggacccccaucagccaugaccccacccuacccccaguucgaacaaagcgaaaccgaaacaguacaccucuucauacccgcccuuucaguaggagcaaucaucggcaaacaaggucaacacaucaaacagcuuucccgauucgccggugcaucaauaaaaaucgcacccgcagaagccccagacgcuaaaguccgcauggucaucaucaccggaccacccgaagcccaauucaaagcccaaggacgaaucuauggcaaaaucaaagaagaaaacuucgucagcccaaaagaagaagucaagcucgaagcccacauccgcguaccaucauucgcagccggccgagucaucggaaaaggcggcaagaccgucaacgaacuacaaaaccucagcuccgcagagguaguaguaccccgcgaucaaacacccgaugaaaacgaccaggucgucgucaaaauuaccggccacuucuacgccugccaagucgcccaacguaaaauacaagaaauacucacgcaaguaaaacaacaucaacaacaaaaagcccuccaaagcggcccaccacagucccgacgcaaauaa

SEQ ID NO: 4264 - RNA, 537 nt, Artificial Sequence
  AAA63207 variant
augcacuccuccgcccuccucugcugccucguccuccucaccggcguccgcgccucccccggccaaggcacccaauccgaaaacuccugcacccacuuccccggcaaccuccccaacaugcuucgcgaccuccgcgacgccuucucccgcgucaaaaccuucuuccaaaugaaagaccaacucgacaaccuccuacucaaagaaucccuccuagaagacuucaaaggcuaccucggcugccaagcccucuccgaaaugauccaauucuaccucgaagaaguaaugccccaagccgaaaaccaagaccccgacaucaaagcccacgucaacucccuaggcgaaaaccucaaaacccuacgccuacgccuccgccgcugccaccgcuuccuccccugcgaaaacaaauccaaagccgucgaacaagucaaaaacgccuucaacaaacuccaagaaaaaggcaucuacaaagccauguccgaauucgacauauucaucaacuacaucgaagccuacaugaccaugaaaauccgcaacuaa

SEQ ID NO: 4265 - RNA, 1143 nt, Artificial Sequence
  AAB17170 variant
auggccuucgucugccucgccaucggcugccuauacaccuucuuaauauccaccaccuucggaugcaccuccuccucagacaccgaaaucaaagucaacccuccccaagacuucgaaaucgucgaccccggcuaccucggcuaccuuuaucuccaauggcaaccaccccucagccucgaccacuucaaagaaugcaccgucgaauacgaacuuaaauaccgcaacaucggcuccgaaaccuggaaaaccauaaucaccaaaaaccuccacuacaaagacggcuucgaccucaacaaaggcauugaagccaaaauacacacccuacuacccuggcagugcaccaacggauccgaaguccaauccuccugggccgaaaccaccuacuggaucucgccccaaggaauacccgaaaccaagguccaagacauggacugcgucuacuacaacuggcaauaccuccucugcuccuggaaacccggcaucggcguacuccucgacaccaacuacaaccucuucuacugguacgaaggccuagaccacgcccuccaaugcgucgacuacaucaaagcagacggacagaacaucggaugcagauucccauaccucgaagccuccgacuacaaagacuucuacaucugcgucaacggcuccuccgaaaacaaacccauccgcucauccuacuucaccuuccaacuacaaaacauuguuaaaccccucccacccgucuaccucaccuucacccgcgaaagcuccugcgaaaucaaacuaaaauggagcaucccacucggccccauccccgcucgaugcuucgacuacgaaaucgaaauccgcgaagacgacaccacccuagucacagccaccgucgaaaacgaaacauacacauuaaaaaccacaaacgaaacccgacaacuaugcuucgucguccgcucaaaagugaacaucuacugcuccgacgacggcaucugguccgaaugguccgacaagcaaugcugggaaggagaagaccucaguaagaaaacccuccuccgcuucuggcuccccuucggcuucauccucauccuugucaucuucgucaccggccuccuccuacgcaaacccaacacauaccccaaaaugaucccagaguucuucugcgauacauaa

SEQ ID NO: 4266 - RNA, 819 nt, Artificial Sequence
  AAA67527 variant
auggacuccuaccuccucauguggggccuccucaccuucaucaugguccccggcugccaagcagaacucugcgacgacgaucccccagaaaucccacacgccaccuucaaagcaauggccuacaaagaaggcacaaugcucaacugcgaaugcaaacgcggcuuccgccgcaucaaaagcggcucccucuacaugcucugcaccggcaacuccucacacucaucaugggacaaccaaugccaaugcaccagcuccgccacacgcaacaccaccaaacaagucacaccccaacccgaagaacaaaaagaacgcaaaaccaccgaaaugcagucccccaugcaacccgucgaccaagcaucccuaccaggacacugccgcgaacccccacccugggaaaacgaagccaccgaacgcauauaccacuucgucgucggccaaauggucuacuaccaaugcguccaaggcuaccgcgcccuacaccgcggccccgccgaaucagucugcaaaaugacacacggcaaaacccgcuggacccaaccccaacuaaucugcacaggagaaauggaaaccagccaauuccccggagaggaaaaaccccaagccucccccgaaggccgaccagaauccgaaaccuccugccucgucaccacaaccgacuuccaaauccaaaccgaaauggccgccaccauggaaaccuccaucuucaccaccgaauaccaaguagccguagcuggcugcguauuccuacucaucuccgugcuacuucuuucaggccucaccuggcaacgccgccaacgcaaaucccgacgcacaaucuaa

SEQ ID NO: 4267 - RNA, 1656 nt, Artificial Sequence
  AAA59143 variant
auggccgccccugcacuaucauggcgccucccacuccuuauacuacuccucccucuagcuacaucaugggccuccgccgcagucaacggaacuucacaguucaccugcuucuacaacucccgcgcuaauaucuccugcgucuggucucaagacggagcccuccaagauacuuccugucaaguccaugccuggccagaccgccgccgcuggaaucaaacaugcgaacuccuacccguaucccaggccuccugggcaugcaaucucauccucggugcccccgacucccaaaagcucacaacagucgacauagucacgcuucgaguacuaugccgcgaaggaguccgcuggagagucauggcgauccaagacuucaaaccauucgaaaaccuccgccuaauggcuccaauaucccuucaaguaguccauguagaaacacaccgcugcaacaucucaugggaaaucucacaagcaagccacuacuucgaacgccaccucgaauucgaagcccgcacccucuccccaggccacaccugggaagaagcaccccuacucacccucaaacaaaaacaagaauggauaugccucgaaacccuaaccccagacacccaauacgaauuccaaguccgagucaaaccccuccaaggcgaauucacgacauggucacccuggucccaaccacucgccuucagaaccaaacccgccgcacucggcaaagacacaaucccauggcuaggucaccuucuagucggccuauccggagccuucggcuucaucauccuagucuaccuccucauuaacugccgcaacaccggaccauggcugaaaaagguccuaaaaugcaacacccccgacccuucaaaauucuuuucccaacuuuccuccgaacacggcggcgacguccaaaaauggcucucauccccuuuccccagcuccagcuucucacccggcggacucgccccugaaaucagcccacucgaaguccucgaaagagacaaaguaacccaacuccuucuccaacaagacaaagucccugaaccagcaucccuauccucaaaccacucccucacaagcugcuucaccaaccaaggauacuucuucuuccaccucccugacgcccucgaaauagaagcaugccaaguauacuucaccuacgacccauacuccgaagaagaccccgacgaaggaguagcaggugcccccaccggaucgagcccucaaccacuacaaccacucagcggcgaagacgacgcuuacuguaccuuccccucucgcgacgaucugcuccuuuucagccccucccuccucggaggaccaagucccccauccaccgcaccagggggcuccggugccggcgaagaacgcaugcccccaucccuacaagaacgcguacccagagacugggacccacaaccccucgguccccccacccccggcguccccgaccuagucgacuuccaacccccacccgaacuaguccuucgagaggccggcgaagaaguccccgacgccggcccgcgagaaggaguauccuucccauggucccgaccaccaggacaaggcgaauuccgcgcccucaacgcccgacucccacucaacacagacgccuaccugucccuccaagaacuccaaggacaagaccccacccaccucgucuaa

SEQ ID NO: 4268 - RNA, 1110 nt, Artificial Sequence
  AAA59145 variant
augcucaaacccucacuccccuucaccucccuccuuuuucuacaacuaccacuucucggcguaggacucaacaccacaauccuaacuccaaacggcaacgaagacaccaccgccgacuucuuccucaccaccaugcccaccgacucacuauccgucuccacacucccccuccccgaaguccaaugcuucgucuucaaugucgaauacaugaacugcacauggaacuccuccuccgaaccccaacccacaaaccucacccuucacuacugguacaaaaacuccgacaacgacaaaguccaaaaaugcucccacuaccucuuuuccgaagaaaucacuuccggcugccaacugcaaaagaaagaaauccaccucuaccaaaccuucgucguccaacuacaagacccacgcgaaccaagacgacaagccacccaaaugcucaaacuccaaaaccucgucauccccugggcccccgaaaaccucacucuacacaaacucucagaaucccaacucgaacuuaacuggaacaaccgauuccuaaaccacugccucgaacaccucguucaauaccgcacagacugggaccacuccuggacagaacagucagucgacuaccggcacaaauucucacuccccuccgucgacggccaaaaacgauacaccuuccguguacgcucccgcuucaacccccuaugcggcucggcccaacacugguccgaauggucucacccaauucacuggggcucaaacaccuccaaagaaaaccccuuccucuucgcccuagaagccgucgucaucucagucggaagcaugggccuuaucaucucccuccucugcgucuacuucuggcucgaacgaacaaugccacgcauacccacccucaaaaaccucgaagaccucgucaccgaauaccacgguaacuucuccgccuggucaggcgucucaaaaggccucgccgaaucccuucaacccgacuacuccgagcgccugugccucgucucagaaauacccccaaaaggaggcgcccuuggcgaaggccccggcgccucgccaugcaaccaacacucacccuacugggccccacccugcuacacucuaaaacccgaaaccuga

SEQ ID NO: 4269 - RNA, 405 nt, Artificial Sequence
  AAA74469 variant
augcgaaugcuccuccaccucucccuccucgcccucggcgccgccuacgucuacgccauccccacagaaauccccaccuccgcccucgucaaagaaacccucgcacuccucuccacccaccgcacccuccucaucgccaacgaaacccuccgcauccccguccccguccacaaaaaccaccaacucugcaccgaagaaaucuuccaaggcaucggcacccuagaaucccaaaccguccaaggcggcaccgucgaacgccucuucaaaaaccucucccucaucaaaaaauacaucgacggccaaaaaaaaaaaugcggcgaagaacgccgccgcgucaaccaauuccucgacuaccuccaagaauuccucggcgucaugaacaccgaauggaucaucgaauccuaa

SEQ ID NO: 4270 - RNA, 555 nt, Artificial Sequence
  AAH06487 variant
augguccgcaaacucaaauuccacgaacaaaaacuccuaaaacaagucgacuuccucaacugggaaguaaccgaccacaaccuccacgaacuccgcguccuccgacgcuaccgccuacaacgccgcgaagacuacacacgauacaaccaacucucccgcgccguccgcgaacucgcccgccgccuacgcgaccuccccgaacgcgaccaauuccgcguccgcgccucagccgcccuccucgacaaacucuacgcccucggccucguccccacccgaggcucccucgaacucugugacuucguaaccgccuccucauucugccgccgccgccuacccacaguccuacucaaacuccgaauggcccaacaccuccaagcagccgucgccuucgucgaacaaggccacguccgagucggccccgacgucgucaccgaccccgccuuccucgucacacgcuccauggaagacuucgucaccuggguagacuccuccaaaaucaaacgccacguccucgaauacaacgaagaacgcgacgacuucgaccucgaagccuag

SEQ ID NO: 4271 - RNA, 3150 nt, Artificial Sequence
  AAH08786 variant
augggcuccaggacccccgaaucaccccugcacgccguacaauugcgcuggggcccccggcgucggccgccccuccucccccuacuccuccuacugcucccgccaccaccucgaguuggaggcuucaaccuagaugccgaagccccagccguccuaagcggcccacccggcuccuucuucggauuuucagucgaauuuuacagaccugggaccgacggcguaucaguccucgucggugccccaaaagcaaauaccucgcaaccuggugugcuccaaggcggagccgucuaccuaugcccguggggagccagccccacccaguguacaccuauagaauuugacuccaaagguucgcgccuacuagaguccuccuuauccucgucggaaggagaagaaccgguagaauacaaaucccuacaaugguuuggugccacaguaagagcucauggaucuucuauacucgccugcgcaccccuguacucuuggcgaacagaaaaagaaccccucucggaccccguagggaccugcuaccuauccacagacaacuuuacacguauucucgaauacgcccccugccgcucugacuucagcugggccgcaggccaaggcuacugccaggguggauucucagcagaguucaccaaaacgggaagagucguccuaggcggcccgggauccuacuucuggcaagggcaaauccuuagugcaacccaagaacaaaucgccgaauccuacuaccccgaauaccuuaucaauuuagugcaaggccaacugcaaacgcgccaggcuuccuccaucuacgacgauuccuaccuuggcuacuccgucgcagucggagaguucucaggcgacgacaccgaagacuucgucgccggggucccaaaaggaaaccuaacuuacggcuacguuacuauacuaaauggauccgacauccguucacucuacaacuucuccggcgaacaaauggccucauacuucggcuacgcggucgccgcuaccgacgucaacggagauggccuagacgaccuccucguaggcgcaccguuacucauggaccguacgccagacggacgcccccaagaagucggacgcgucuacguauaccuacaacauccagcaggaauagaacccacacccacucuaacccuaaccggccacgaugaguucggaagauucggcucaucccucaccccacucggggaccuagaccaagacggauauaacgacgucgcaauaggcgcccccuucggaggcgaaacacaacagggagucgucuuugucuucccaggaggccccgguggucucggcucaaaacccucgcaaguacugcaaccucuaugggcagcuucccacacccccgauuucuucggaagcgcacuccgcggcggccgugaccucgacggcaacggcuaucccgaccucaucguaggcagcuuuggcguagacaaagcggucguuuaccgcggaagacccauagucuccgcuucagccucgcuaacgaucuuccccgccauguucaacccggaagaacgcuccugcucacucgaaggaaacccaguagcaugcaucaaccucucauucugucucaaugccuccgguaaacacgucgcugacagcaucggcuucacugucgaacugcaguuagacuggcaaaaacaaaaaggcggcguacgccgggcacucuuccucgcaucccgacaagccacucucacccaaacccuucugauccaaaauggcgcucgcgaagacugcagagaaaugaaaaucuaccuccgaaacgagucggaguucagggacaagcucucccccauccauaucgcccuuaacuucucucuggacccacaagcaccaguagacucccacggccuccgcccagcguuacacuaccaauccaagucucgcauagaagacaaagcucaaauccuccucgauugcggagaagacaacauaugcguaccagaccuacaacucgaagucuuuggagaacaaaaucacguauaccucggcgacaaaaacgcccucaacuuaaccuuccacgcucaaaacgucggagagggcggggccuacgaagccgaacuccgcgucacugccccacccgaagcagaauacucaggccuaguucgccaucccggcaacuucuccucacucagcugugacuacuucgcaguuaaccaaucccgacuucucgucugcgaccucggcaaccccaugaaagccggcgccucccuuuggggaggauuacguuucaccgucccucaccuccgagacaccaaaaagacgauccaauuugacuuccaaauccuguccaaaaaccucaauaauucacaguccgacguaguauccuuccgccuaucagucgaggcacaagcgcaaguuacgcuuaacggugucaguaaaccggaagccguccuauuucccguaucagacuggcacccucgcgaccaaccacaaaaagaagaagaccuaggccccgccguucaucaugucuacgaacucaucaaccaaggacccucauccaucagccaaggcguucucgaacuaucaugcccucaagcacuagaaggccagcaacuucucuacgucacacgcgucacagggcucaacugcaccaccaaccauccgauaaacccuaagggccucgaacuagacccugaaggcagccuacaccaccaacagaaaagagaagcacccucucgcuccagcgcaucuucaggcccucaaauccugaaaugcccagaagccgaaugcuuuagacuccggugcgagcugggcccccuccaccagcaagaaagccagucccuacagcuacacuuucgcguaugggccaaaacauuccuccaacgggagcaccaaccuuucucacuccaaugcgaagcgguauacaaggcacuuaagaugcccuaccgcauauuaccacgacaacucccacaaaaagaaagacagguugcaacggccguacaauggacaaaagccgaaggcucauacgguguaccgcuauggaucauaauccuagcgauacuuuucggccuucuccuccugggacuccucauauacauccucuauaaacuaggcuucuucaaacggucccuaccuuacggaaccgccauggaaaaagcucagcucaaaccgcccgcaacuucagacgccuaa

SEQ ID NO: 4272 - RNA, 2397 nt, Artificial Sequence
  AAH20057 variant
augaaccuccaacccaucuucuggauuggccucaucucgagcguaugcugcguauucgcccaaaccgacgaaaaccggugccuaaaagccaacgccaaauccugcggcgaaugcauacaagccggccccaacugcggguggugcaccaauucuaccuuccuacaggaaggaaugccaaccagcgcccgcugcgacgaccucgaagcacuaaagaagaaagggugcccacccgacgacaucgagaaccccagagguucuaaagacauaaagaaaaacaaaaacguaaccaaccgguccaaaggcaccgcggaaaaacuaaaacccgaagacauaacucaaauccaaccccagcagcucguacugagacugagaagcggcgagccccagaccuucacgcuuaaauucaaacgugcggaagacuaccccaucgaccuauacuaccucauggaccuauccuacucaaugaaagacgaccucgaaaauguaaaaucacucggaaccgaucuaaugaaugaaaugcgacgaaucacauccgacuuccgcaucggguuuggcuccuucgucgagaaaaccgugaugccauauaucucaaccacuccggcaaaacuacggaacccuugcaccagcgaacaaaacugcacauccccauucuccuacaaaaacguacucucccucaccaacaaaggcgaggucuucaacgagcuagucggaaaacagcggaucagcggcaaccucgauuccccagaaggaggauuugacgccauaaugcaaguggccguaugcggaucccucauaggcuggcgcaacgucacccgccuccucguauucagcacggacgcagguuuccacuucgcaggcgacggcaagcuaggaggcauagugcuccccaacgacggccagugucaucuagaaaacaacauguauaccaugagccacuauuacgauuaccccucuauugcacaccugguucaaaaacucucagaaaacaacauacagacaaucuucgccguaacggaagaguuccaacccguauauaaggaacucaaaaaccucaucccaaaaagcgcugucggaacccucuccgcaaacucaagcaacguaauccaacuaaucaucgacgccuacaacagccuaagcuccgaagucauccuagaaaacggcaaacucucggaaggcguaacaaucucuuacaagaguuacugcaaaaauggcgucaacggcaccggcgagaauggccgaaaaugcuccaacauaagcaucggagacgaaguccaguucgaaaucucaaucacaagcaacaaaugccccaagaaagacucugacuccuucaaaauacgaccccuaggcuuuacugaagaaguagaagucauucuacaguacaucugcgaaugcgaaugccaaagcgaaggaauccccgaaagccccaaaugccacgaaggcaacggaaccuucgaaugcggagccugccgaugcaacgaaggccgaguaggccgccacugcgaaugcagcacagacgaagucaacucagaggacauggacgcauauugccgcaaagaaaacagcucggaaaucugcagcaauaacggcgaaugcgucugcggccaaugcgucugccgaaaacgcgacaauacgaacgaaauauacucugggaaauucugcgaaugcgacaauuucaacugugaccgaucgaacgggcucaucugcgggggaaacggcguaugcaaaugccgcgucugcgaauguaacccaaacuacaccggauccgccugcgacuguucccuagacaccucaaccugcgaggcaucaaaugggcaaaucugcaacggccgagguaucugcgaauguggagucugcaaaugcacagaccccaaauuccagggccaaaccugcgaaaugugccaaacaugccuuggcguaugugcugagcacaaggaaugcguacaaugccgagccuucaacaaaggcgagaaaaaggacacgugcacucaggaaugcagcuacuuuaacaucaccaagguagaaagccgagacaaacuaccccaaccaguccaacccgacccgguaucccacugcaaagaaaaagacguagacgacugcugguucuacuucaccuacagcguaaacggcaacaacgaggucaugguacauguaguagaaaaccccgaaugcccgaccggcccagacauaaucccgauaguugcaggaguaguagcaggaauaguccugauaggccucgcauuguuacuuaucuggaaacuccugaugaucauccacgaccgcagagaauuugcgaaguucgaaaaagagaaaaugaacgccaaaugggacacaggcgaaaacccaauauacaaauccgcagucaccaccgugguaaacccaaaauacgaaggaaaguaa

SEQ ID NO: 4273 - RNA, 2367 nt, Artificial Sequence
  AAA36122 variant
augggaaucgaauuacuaugucucuuuuuccuauuccugggccgcaacgaucacguacaaggaggaugcgcccuaggcggggccgagacaugcgaagacugccuccuaauaggaccucaaugcgccuggugcgcccaagaaaacuucacccaccccuccggcgucggcgaacgcugcgacacaccagcaaaccuacucgccaaaggcugccaacuaaacuucaucgaaaaccccgucucccaagucgagauccucaaaaauaaaccccucuccgugggacgccagaaaaacucgucagacaucguccaaaucgcaccccagucacucauccucaaacuccgacccggcggggcccaaacucugcaaguacacguccggcaaacagaagacuacccaguggaccuauacuaccuaauggaccucuccgccuccauggacgacgaccuaaacaccaucaaggagcucggcucacgacugaguaaagaaauguccaaacucacuucgaacuuccgccuaggcuucgggucauuuguagaaaaacccgucagccccuucgucaaaaccacaccagaagagauagcaaaucccugcagcagcauaccuuacuucugucuacccacauucggauucaaacacauacucccccuaaccaacgaugccgaacgcuucaacgaaaucgugaaaaaccagaagaucuccgccaacaucgacacacccgaagguggcuucgacgccaucaugcaagcagcaguaugcaaagagaaaauaggcuggcgaaaugacucucuacaccuacucguauucgucuccgacgccgacagccacuuuggcauggacagcaaacucgcgggcauagugauccccaacgacggacuaugccaccuggacucgaaaaacgaauacagcaugucaaccgucuuagaauaccccaccaucggacaacuaaucgauaaacucguacagaacaacguucuacuaauauucgcggucacccaagaacagguucaccucuacgaaaacuacgccaaacugauaccgggugccacagugggccuacuacagaaagacuccggcaacauucuucagcuaaucauaagcgccuacgaggaacuccgcagcgaaguagagcuggaaguccuaggcgacacggaaggccucaaccuaucuuucaccgcaaucugcaacaacggcacccucuuccagcaccagaaaaagugcucgcacaugaaagucggcgacaccgccucauucuccguaacugucaacaucccacacugcgaacgacgcucgcgacacauuauaaucaaacccgucggccucggugacgcacucgaacuccucguauccccagaguguaacugcgacugccaaaaagaaguugaggucaacucaagcaagugccaccacggcaacggauccuuccaaugcggagucugugcgugccacccggggcacaugggaccccgcugcgagugcggagaagacaugcucuccaccgacaguugcaaagaagcuccagaccaccccuccugcagugggcguggagacugcuacugcggucaaugcaucugccaccugucgcccuacggaaacaucuacggacccuacugccaaugcgacaacuucuccugcguacgacacaaaggccuccucugugguggcaacggagacugcgacugcggggagugcgucugccgcucuggcuggaccggcgaauacugcaacugcaccaccagcacagacuccugcgucucagaagacggcguccucugcagcggccgaggagacugcgucugcgggaaaugcgucugcacuaacccgggagcaagcgggcccacuugcgaacgcugcccgaccugcggagaccccugcaauagcaagcgaucaugcaucgaaugucaccucuccgccgccggacaagcccgcgaagaaugcguagacaaaugcaaacucgcuggagccaccauauccgaagaggaagacuucuccaaagacggaagcguaucgugcucccuacaaggagaaaacgaaugccucaucaccuuccuaauaacaacggacaacgaaggaaagaccaucauccauagcauaaacgagaaagacugccccaagccacccaacauacccaugaucaugcuaggcguaucccuggcaauccuucugaucggagugguccuauuaugcauuuggaaacucuuaguuucauuccacgauagaaaggaagucgccaaauucgaagccgaacgcuccaaagcgaaauggcaaaccggcacaaauccacuauacagggguagcaccucaaccuucaaaaacguaaccuacaaacacagagaaaagcaaaaagucgaccucagcacugacugcuaa

SEQ ID NO: 4274 - RNA, 786 nt, Artificial Sequence
  EAW71937 variant
augugggaccucguccuuuccaucgcccucuccgucggcugcacaggcgccguaccccucauccaaucccgcaucgucggcggcugggaaugcgaaaaacacucacaacccuggcaagucgccguauacucccacggcugggcccacugcggcggcguccucguccacccccaauggguccucaccgcagcccacugccucaaaaaaaacucccaagucuggcucggccgacacaaccucuucgaacccgaagacaccggccaacgcguccccgucucacacuccuucccccacccacuauacaacaugucccuccuuaaacaccaaucccuccgacccgacgaagacuccucccacgaccucaugcuccuacgcuuaucagaacccgcaaaaaucaccgacgucgucaaaguccucggccuccccacccaagaacccgcccuaggaaccacaugcuacgcauccggauggggcucaaucgaacccgaagaauuccuccgcccccgcucccuacaaugcgucucccuccaccuacuauccaacgacaugugcgcccgcgccuacucagaaaaagucaccgaauucaugcucugcgccggccucuggaccggcggaaaagacaccugcggcggagacuccggcggcccccucgucugcaacggcguccuccaaggcauaaccucauggggcccugaacccugcgcccuacccgaaaaacccgccgucuacaccaaagucguccacuaccgcaaauggaucaaagacaccaucgccgccaaccccuaa

SEQ ID NO: 4275 - RNA, 672 nt, Artificial Sequence
  EAW71938 variant
augugggaccuaguccucuccaucgcacuauccgucggcugcaccggcgccgucccacuaauccaaucacgaaucgucggcggcugggaaugcgaaaaacacucccaacccuggcaaguagccguauacucacacggcugggcccacugcggcggaguccuuguccacccccaauggguccuaacagccgcccacugccucaaaaaaaacucccaagucuggcucggccgccacaaccucuucgaacccgaagacacaggccaacgcguccccgucucacacucauucccccacccccucuacaacaugucucuccucaaacaccaaucacuccgccccgacgaagacuccucccacgaccucaugcuccuccgacucucagaacccgccaaaaucaccgacgucgucaaaguccucggccuccccacccaagaacccgcccucggcaccaccugcuacgccuccggcuggggaucaaucgaaccugaagaauuccuccgccccagaucccuccaaugcguaucccuccaccuacucuccaacgacaugugcgcccgcgccuacuccgaaaaagucaccgaauucaugcuaugcgccggccucuggaccggaggcaaagacacaugcggcgucucccaccccuacucccaacaccucgaaggcaaaggcuaa

SEQ ID NO: 4276 - RNA, 189 nt, Artificial Sequence
  BAF98781 variant
augucccuccucaaacaccaaucccuccgccccgacgaagacuccucccacgaccucaugcuccuccgccucuccgaacccgccaaaaucaccgacgucgucaaaguccucggccuccccacccaagaacccgcccucggcaccaccugcuacgccuccggcuggggcuccaucgaacccgaagaauaa

SEQ ID NO: 4277 - RNA, 735 nt, Artificial Sequence
  BAG62239 variant
augggcacccucuggggaugccccggcgcccccccagucggagcccacuccugcccccuacccaaagaagucucccgcacccucggguccggcgaaggaauggccgucucccaccgcaacaacucaggaaugcuacccccaggcucacuccuccgcaacucccaagucuggcucggacgccacaaccucuucgaacccgaagacaccggccgccgcguccccguaucccacuccuucccccacccccucuacaacaugucacuccucaaacaccaaucucuccgccccgacgaagacucaucccacgaccucaugcuccuacgacucuccgaacccgccaaaaucaccgacgucgucaaaguccucggccuccccacccaagaacccgcccuaggcacaaccugcuacgccuccggcuggggcuccaucgaaccagaagaauuccuccgcccccgcucccuccaaugcgucucccuccaccuccucuccaaugacaugugcgcccgugccuacucugaaaaagucacugaauucaugcucugcgccggacucuggaccggcggcaaagacaccugcggcggcgacuccggcggcccccucgucugcaacggcguacuccaaggcauaacauccuggggacccgaacccugcgcacuccccgaaaaacccgccguauacaccaaagucguccacuaccgaaaauggaucaaagacaccaucgcagccaaccccuaa

SEQ ID NO: 4278 - RNA, 786 nt, Artificial Sequence
  AAA74454 variant
augugggaccucguccuauccaucgcccuauccgucggaugcaccggagccgucccccucauacaaucccgcauaguaggcggcugggaaugcgaaaaacacucccaacccuggcaagucgccgucuacucacacggcugggcccacugcggcggcguccuaguccacccccaauggguccucaccgccgcccacugccuuaaaaaaaacucgcaaguauggcucggccgccacaaccucuucgaaccagaagacaccggccaacgcguccccguaucacacuccuucccacacccccucuacaacaugucccuccucaaacaccaaucacuccgcccugacgaagacuccucccacgaccucaugcuccuccgccucuccgaacccgcaaaaaucacagacgucgucaaaguccucggccuccccacccaagaacccgcccucggcaccaccugcuacgccucaggauggggcuccaucgaaccagaagaauuccuacgcccccgcucacuccaaugcgucucccuccaccuacucuccaacgacaugugcgcacgagcauacuccgaaaaagucaccgaauucaugcucugcgccggccuauggaccggcggcaaagacaccugcggcggcgacucaggcggcccacuugucugcaacggcguacuccaaggaaucaccuccuggggccccgaacccugcgcccuccccgaaaaaccagcagucuacaccaaagucguccacuaccgcaaauggauaaaagacaccaucgccgcaaacccauaa

SEQ ID NO: 4279 - RNA, 150 nt, Artificial Sequence
  AAR10469 variant
augugggaccucguccucuccaucgcccucuccgucggcugcaccggcaucgcccgcuccggcugggucggcaccaccugccucucccucaaaacccaagcccgcggcucccucuccgccaccgccucccacacccgcuccaccaucuaa

SEQ ID NO: 4280 - RNA, 543 nt, Artificial Sequence
  AAR10468 variant
augugggaccuaguccucuccaucgcccucuccgucggcugcaccggcgccgucccacuaauccaaucccgcaucgucggcggcugggaaugcgaaaaacacucccaacccuggcaagucgccguauacucacacggcugggcccacugcggcggaguccuaguccacccccaauggguccucaccgccgcccacugccucaaaaaaaacucacaaguauggcucggccgccacaaccucuucgaacccgaagacaccggccaacgaguccccgucucccacuccuucccccacccccucuacaacaugucccuccuuaaacaccaaucccuccgacccgacgaagacuccucccacgaccucaugcuccuccgccucuccgaacccgccaaaauaaccgacgucgucaaaguccucggccuccccacccaagaaccagcccuaggcaccaccugcuacgccuccggcuggggcuccaucgaaccagaagaaugcacccccggccccgacggcgucgccggcucccccgacgccugggucuaa

SEQ ID NO: 4281 - RNA, 765 nt, Artificial Sequence
  EAW71943 variant
auggccacagccggcaaccccuggggaugguuccuaggauaccucauccucggcgucgccggcucacucgucucaggcuccugcucacaaauaaucaacggagaagacugcucaccccauucccaacccuggcaagccgcccucgucauggaaaacgaacucuucugcuccggcguccuaguccacccccaauggguccucuccgcagcccacugcuuccaaaacuccuacaccaucggccuaggccuccacagccucgaagcagaccaagaacccggcucccaaauggucgaagccucccucuccguccgccaccccgaauacaaccgcccccuccuugccaacgaccucaugcucaucaaacucgacgaauccguuuccgaauccgacacaaucagaucaaucucuaucgccucccaaugccccaccgccggcaacuccugccuagucagcggcuggggccuccuagcuaacggccgcaugcccacaguccuccaaugcgucaacgucuccguaguuuccgaagaagucugcagcaaacucuacgacccccucuaccaccccucuauguucugcgccggcggcggccaggaccaaaaagauuccugcaacggcgacuccggcggcccccucaucugcaacggcuaccuccaaggccucgucuccuucggcaaagccccuugcggccaaguaggagucccaggagucuacaccaaccucugcaaauucaccgaauggaucgaaaaaaccguccaagccuccuaa

SEQ ID NO: 4282 - RNA, 228 nt, Artificial Sequence
  AAX30051 variant
auggccaccgccggcaaccccuggggcugguuccucggcuaccucauccucggcgucgccggcucccucgucuccggcuccugcucccaaaucaucaacggcgaagacugcuccccccacucccaacccuggcaagccgcccucgucauggaaaacgaacucuucugcuccggcguccucguccacccccaauggguccucuccgccgcccacugcuuccaaaaauaa

SEQ ID NO: 4283 - RNA, 588 nt, Artificial Sequence
  AAL14782 variant
auggccaccgccggcaaccccuggggcugguuccucggauaccucauacucggcgucgccggcucgcucgucuccggcuccugcucacaaaucaucaacggcgaagacugcagcccccacucccaacccuggcaagccgcacuugucauggaaaacgaacucuucugcuccggcguccucguccacccccaauggguccucucagccgcccacugcuuccaaaacucauacaccaucggccucggccuccacucccucgaagccgaccaagaacccggcucccaaauggucgaagccucacucuccguccgacacccugaauacaacaggccccuacuagccaacgaccuaaugcucaucaaacucgacgaauccgucucugaaagcgacaccauccgcuccauauccaucgccagccaaugccccaccgccggcaacagcugccucgucuccggcuggggccuccucgccaacggcgaacucacaggcgucugccuacccucaucccgccgcuccuccgcccaaucccgaggccucacccaauccuccgccucccaagcagaaugccuccccugcugcuccgccuaa

SEQ ID NO: 4284 - RNA, 480 nt, Artificial Sequence
  AAL14781 variant
auggccaccgccggcaaccccuggggcugguuccucggcuaccucauccucggcguagccggcucccucgucuccggcuccugcucccaaaucaucaacggcgaagacugcucaccccacucccaacccuggcaagccgcccucgucauggaaaacgaacucuucugcuccggcguccuaguccacccccaauggguccuauccgccgcucacugcuuccaaaacuccuacaccaucggccucggccuccacucccucgaagccgaccaagaacccggcucccaaauggucgaagccucccuuuccguccgccaccccgaauacaaccgcccccuccuagccaacgaccucaugcucaucaaacucgacgaauccgucuccgaauccgacaccauccgcuccaucuccaucgccucccaaugccccaccgccggcaacucaugccucgucuccggcuggggccuccucgccaacggauaa

SEQ ID NO: 4285 - RNA, 765 nt, Artificial Sequence
  AAD21580 variant
auggccaccgccggcaaccccuggggcugguuccuaggcuaccucauccuaggcgucgccggcucccuagucucaggaagcugcucacaaaucaucaacggcgaagacugcuccccacacucacaacccuggcaagccgcccuagucauggaaaacgaacucuucugcucaggcguccuaguccacccccaauggguccuaucagccgcacacugcuuccaaaacuccuacaccaucggacucggacuccacucccucgaagccgaccaagaacccggcucccaaauggucgaagccucccuaucgguacgccaccccgaauacaacagaccacuacuagccaacgaccucaugcucaucaaacucgacgaauccgucagcgaauccgacaccauacgcucaaucucaaucgccucccaaugcccaaccgccggcaacagcugccucgucagcggcuggggccuacucgccaacggcagaaugcccaccguccugcaaugcgucaacguauccguagucucagaagaagucugcuccaaacucuacgacccacucuaccaccccagcauguucugcgcaggcggcggucacgaccaaaaagacuccugcaacggcgacuccggcggcccccucauaugcaacggauaccuccaaggccucguauccuucggcaaagcccccugcggccaagucggagucccaggcgucuacaccaaccucugcaaauucaccgaauggaucgagaaaaccguccaagccucauaa

SEQ ID NO: 4286 - RNA, 2673 nt, Artificial Sequence
  AAC83230 variant
augucacaaggaauacucagcccacccgccggacuacucucggacgacgacguaguagucucaccgauguucgaaagcaccgcagccgaccuaggcucaguaguccgcaaaaaccuacugagcgauugcucaguugucuccacaucccucgaggacaaacaacaagugccauccgaagacucaauggaaaaagucaaagucuaccuccgcguucgaccccugcugcccucagagcucgaacgacaggaagaccaggguugcgucagaaucgaaaacguagaaacccuaguccuacaagcccccaaagacuccuucgcgcugaaauccaacgaacgagguauaggccaggccacacaccgcuucacguucagucagaucuucggcccagaagucgggcaagcaucauucuuuaaccucaccgucaaagagauggucaaagauguccucaagggacagaacuggcucauauacacuuacggaguaacuaacuccggcaagacacacaccauccaaggaacgauaaaagacgguggaauccuaccccgcucccucgcacuaaucuuuaauucacuccagggacaacugcaccccacccccgaccuuaagccccucuuaagcaacgaaguaaucuggcuagacucaaaacaaauccgacaggaagaaaugaagaaacuaucacucuuaaacggaggccuacaagaagaggagcuuagcacgagccucaaacgaagcguauacaucgagucaagaauaggaaccucaaccuccuuugauucagguaucgccggacuauccagcauaucgcaguguacuuccuccagccaacucgacgaaacaucacaccgcugggcacaaccagacacagcaccccuucccgucccagccaacauccgauucuccaucuggaucuccuucuucgaaauuuacaaugagcuacuauaugaucuccuagaaccgccaucccaacaacgaaaacgccaaacccuacgccucugugaggaccaaaauggcaacccauaugucaaagaccucaacuggauccacgugcaagaugcggaagaagccuggaaacuccucaaagucggacgcaaaaaccaaucauucgcaagcacccaccucaaccaaaauuccucccgaucgcacucgaucuuuagcauccgaauccuccaccuccaaggagaaggcgacaucgucccaaaaaucuccgaacucagccucugcgaccuugccggcucugaacgcugcaaagaccaaaaaucaggagaacgccuuaaagaagccggcaacaucaacacaagccuccacacccucggacgaugcauagccgcccugagacaaaaccagcaaaaccgauccaaacagaaccucguaccauuccgugauuccaaacuaacaaggguauuccaaggauucuucaccggucgcggccgauccugcaugaucgucaacguaaaccccugcgcaucuacauacgacgagaccuuacacgucgccaaauucucugccaucgcgagccagcucguccacgccccacccaugcagcuaggcuuccccucccuucacucguucaucaaagagcacagccuccaaguuagccccucccuugagaaaggcgcgaaagccgacaccgggcucgacgacgacaucgaaaaugaggcggacaucuccauguacggaaaagaggaacuccuccaaguaguagaagcaaugaaaacccuccugcuaaaagagcgccaagaaaaacuccaacucgaaaugcaccuaagagacgaaaucugcaacgaaauggucgaacaaaugcaacaacgagaacaguggugcucugaacacuuagacacacaaaaagaacuccucgaagagauguacgaagaaaaacucaacauccuaaaagaaucccuaaccagcuucuaccaagaagaaauacaagaacgcgacgagaagauagaggaacucgaggcacugcuucaggaagcccgacaacaaucaguagcccaccagcaaucuggcuccgaacuagcacuccgacgcucucaacgacucgcagcauccgcaagcacccagcagcuacaagaagucaaagcaaaacuccaacaaugcaaagcggagcuaaacucaacgaccgaagaacuccacaaguaccagaaaaugcuagagcccccucccucagcaaaacccuucaccaucgacgucgacaagaaacucgaagaaggccagaaaaacauacgacuccuccgaaccgagcuacagaaacucggagagagcuuacaguccgccgaacgcgccuguugccauagcacgggcgcaggcaaacugagacaagcccucacaaccugcgaugacauacuaaucaaacaagaccaaacccuggccgaauuacaaaauaacaugguccuaguaaagcuggaccuacgcaagaaagcagccuguauagccgaacaguaccacaccguacucaaacuccaaggacaagucagcgcaaagaaaagacuaggcaccaaccaagagaaccaacaacccaaccagcagccacccggaaagaaacccuuccuacgcaaccuccucccccggacgccaacaugccaaagcagcacugacugcuccccauacgcacgcauacuccgaucacgccgcuccccacuucucaaaagcggucccuucggcaagaaauacuag

SEQ ID NO: 4287 - RNA, 1113 nt, Artificial Sequence
  AAH34621 variant
auggccaucacccucgaagaagcccccuggcuaggcuggcugcucgucaaagcccucaugcgcuucgccuucaugguaguaaacaaccucgucgccauccccucauacaucuguuacgucaucauccuccaaccccuccggguccucgacuccaaacgcuucugguacaucgaagguauaauguacaaauggcuccuaggaaugguagccuccuggggcugguacgccggcuacacugucauggaauggggcgaagacaucaaagccgucucaaaagacgaagcagucaugcuagucaaccaccaagccaccggugacguaugcacacuuaugaugugccuccaagacaaaggccucguagucgcccaaaugauguggcucauggaccacaucuucaaauacaccaacuucggcauagucucacucguccacggagacuucuucauccgccaaggacgcuccuaccgcgaccaacaacugcuacuccucaaaaagcaccucgagaacaacuaccgcucccgagaccgcaaauggaucguccucuucccagaaggcggcuucuuacgcaaacgccgcgaaacaucacaagccuucgcaaaaaaaaacaaccuccccuuccuaacaaacgucacccucccccgcuccggcgcuaccaaaaucauccuaaacgcacucgucgcccaacaaaaaaacggcucccccgccggcggcgacgcaaaagaacucgauuccaaaucaaaaggccuccaauggaucaucgacaccaccaucgccuaccccaaagccgaacccaucgacauccaaacauggauacucggcuaccgcaaacccaccgucacccacguccacuaccgcaucuuccccaucaaagacgucccauuagaaaccgacgaccucaccacauggcuguaccaacgauucgucgaaaaagaagaccuccucucccacuucuacgaaaccggcgcauucccccccuccaaaggccacaaagaagccgucucacgcgaaaugacccucucaaaccucuggaucuuccuaauccaguccuucgccuuccuaagcggcuacaugugguacaacaucauucaauacuucuaccacugccuauucuaa

SEQ ID NO: 4288 - RNA, 2178 nt, Artificial Sequence
  AAH14924 variant
auggccauggacuccucgcugcaggcacgccucuucccagggcuagccaucaaaauccaacgaagcaacggccuaauccacagcgcaaacguucgaaccgugaaccuagaaaaaucaugcguaagcgucgaaugggcggaaggaggagcaaccaaaggaaaagaaaucgacuucgacgacguagccgccaucaaccccgaacugcuccaacuccugccccuccacccaaaagacaaccuaccgcuccaagaaaacgucacaauacagaagcagaaacgacgcucagucaacuccaaaauacccgcacccaaggaaagccuccgaagccgcuccacgcgcaugucgaccgucagcgagcuccgcauaacagcucaagaaaacgacauggaagucgaacuaccugccgcggcaaauucgcggaagcaauucagcguaccgccagcaccgacccgccccuccugccccgccguagcagaaaucccccuccgaaugguaagcgaagaaauggaagaacaaguucacagcauaagagguagcagcucagcaaacccggucaauagcguccgccgcaaaagcugccucgucaaagagguggagaaaaugaaaaacaagagagaggaaaagaaagcgcaaaacuccgaaaugcgcaugaaacgcgcacaggaauacgacucuucguucccaaacugggaguucgcacgcaugauaaaagaguuccgagcaacccuggaaugccauccccucacgaugacugacccaaucgaagaacaccggaucugcgucugcguccgcaaacgcccacucaacaaacaagaacucgccaagaaagaaaucgacgucaucagcauaccgagcaaaugccucuuacugguacacgaacccaaacuaaaaguagaccuaacgaaauaccucgaaaaccaagccuuuugcuucgacuucgcuuucgacgaaaccgcgucaaacgaaguaguauaccgauucacagcacgcccccuaguacaaacaaucuucgaaggaggcaaagcaaccugcuucgccuacggccaaacaggauccggaaaaacacacacaaugggcggggaccucuccggaaaagcccaaaacgccucaaaagggaucuacgccauggcgagcagggacgucuuccuccugaaaaaccagccaugcuaccgaaaacuaggacuggaaguauacguaacguucuucgaaauauacaauggaaaacuauucgaccuacugaacaagaaagccaaacugcgcguccuagaagacgggaaacagcaaguccaagucgucggacuucaggaacaucucgucaauucagccgacgacguuauaaaaaugauagauaugggcuccgcaugcagaacauccggccagacauucgccaacucaaacagcagccguucacacgcaugcuuucaaaucauccucagagcaaaaggccgcaugcacggaaaauucucgcuaguggaccuggcaggaaacgaacgcggcgcagacaccuccuccgcagaccgccaaaccagaauggaaggagcagaaaucaacaaaagccuccuagcccucaaagaaugcauccgcgcacucggacaaaacaaagcacacaccccuuucagggaaagcaaacucacgcaagugcucagggacaguuucauaggagaaaacucaagaaccugcaugaucgcgaccauaagcccuggaauaagcuccugcgaauacacccucaacacacugcgauaugccgauagaguaaaagaacuuucuccccacucaggacccucaggcgagcaacuaauacagauggaaacggaagaaauggaagccugcagcaacggcgcacugauccccggcaaccucuccaaagaagaagaggaacucucaagccagaugucauccuucaacgaggcaaugacucaaauccgagagcucgaagaaaaagcaauggaggaacucaaagaaauaauacagcagggcccagacuggcuagaacucagcgaaaugaccgaacaacccgacuacgaucuggagaccuucgucaacaaagcagaaagcgcccuagcgcaacaagccaaacacuucuccgcccuacgcgacguaaucaaggcacuacggcucgccaugcaacucgaagaacaagccucacgccaaaucaguucuaagaaaaggccacaauaa

SEQ ID NO: 4289 - RNA, 342 nt, Artificial Sequence
  AAH62223 variant
augaacuucuaccuccuccucgccuccuccauccucugcgcccucaucgucuucuggaaauaccgccgauuccaacgcaacaccggcgaaauguccuccaacuccaccgcccucgcccucguccgccccuccuccuccggccucaucaacuccaacaccgacaacaaccucgccgucuacgaccucucccgcgacauccucaacaacuucccccacuccaucgcacgccaaaaacgcauccucgucaaccucuccauggucgaaaacaaacucgucgaacucgaacacacccuccucuccaaaggcuuccgcggcgccuccccccaccgcaaauccaccuaa

SEQ ID NO: 4290 - RNA, 2583 nt, Artificial Sequence
  AAA56833 variant
auggggccauggggauggaaacucagauggaccguagcacucuugcuagccgccgccggcaccgccgucggagaccgaugcgaacgcaacgaguuccagugccaagacggaaaauguauaaguuacaaaugggucugcgacggcucagcagaaugccaagacggcagcgacgaaucacaagaaaccugccucuccguaaccugcaaguccggagacuucagcugcggcgggcgcguaaacagaugcauaccccaauucuggcgcugcgauggacaagucgacugugacaacggaagcgacgaacaagggugucccccaaaaacauguucccaggacgaguuccgaugccacgacggaaagugcaucucacgccaauucgucugcgauagcgaccgggacugccuggacggaagcgacgaagcgagcugcccaguacucacaugcgggccugccaguuuccaauguaacuccucuaccugcaucccacaacucugggcaugcgacaacgacccggauugcgaggacggcucagaugaauggccgcaacgcugccggggacuguacguauuccaaggugauagcagccccugcucagcauucgaauuucacugccugagcggcgaaugcauccacagcuccuggcgcugcgauggcggaccugacugcaaagacaagagcgacgaggaaaacugugcaguagcgaccugccgucccgacgaauuucaaugcagcgauggcaacugcauacacggaagccggcaaugcgaccgcgaauacgacugcaaagacaugagugacgaggucggcugcguuaacguaacccuaugugagggaccaaauaaauucaaaugccacagcggcgaaugcaucacccuggacaaagucuguaacauggccagagacugccgugacugguccgacgaacccaucaaagaaugcggaaccaacgaaugucucgacaacaacggaggcugcucacacgucugcaacgacuuaaagaucggguacgaaugccuaugucccgacggcuuucaacucgucgcccaacgaaggugcgaagacaucgacgaaugccaggacccugauacaugcucccaacuaugugucaaccuagaaggaggcuacaaaugccaaugugaagaaggcuuccaacuagacccgcacacaaaagcaugcaaagcagucgggaguauagccuaccuauuuuucaccaacagacacgaagucagaaaaaugacacucgaccgguccgaguacacaucgcucauacccaaccuacgaaauguagucgcacucgacaccgaaguagccucuaaccgcauauacugguccgaccuaagccaacggaugauaugcucuacccaacuugaucgcgcccacggagugucaagcuacgauaccgucaucucccgagacauacaggcccccgacggacuagccgucgacuggauacacagcaacaucuacuggacagacuccguccuaggaacagucuccguagcagauacaaaaggagucaaacgcaaaacgcuauuccgagaaaacggauccaaaccacgugcaauagucgucgaccccguacacggauucauguacuggaccgacuggggcaccccagccaaaauuaagaaaggaggacuaaacggagucgacaucuacagccucguaaccgagaacauacaauggccaaacggcaucacgcuugaccucuuaucaggacgacuauacugggucgacagcaaacuacacuccaucaguuccaucgacgucaauggugggaaccggaagaccauacuagaggacgaaaaacgauuagcacaucccuucucucuugccguauuugaagacaaagucuucuggacagacauaauaaacgaagcuaucuuuagcgcaaaucgacucaccggaucggacguaaacuuacuagcggaaaaccuucucagcccagaagacaugguucucuuccacaaccucacgcaaccgcgcggagucaacuggugcgaaaggaccacacuguccaacggcggaugucaauaucucugccuaccagccccacagauaaauccacauucacccaaauucacgugcgcaugccccgacgggaugcuacucgcacgcgacaugaggagcugccuuaccgaagcagaagccgcagucgccacccaagaaaccuccacaguacgacuaaaagucucauccaccgcagucaggacccaacacacgaccacccgccccguacccgacaccucacgacuucccggagcaacgccaggccuaaccaccgucgagaucgucacuaugucgcaccaagcgcuaggcgacguagccgggagagggaacgagaaaaagccgucaagcguacgcgcccuauccaucguacucccaaucguccuccuagucuuccucugucucggagucuuccucuuauggaaaaacuggcgccuuaagaacaucaacagcauaaacuucgacaacccagucuaccagaaaacuaccgaagacgagguacacaucugccacaaccaagacggauauagcuaccccagccgucaaauggucagccuggaagacgacgucgccuaa

SEQ ID NO: 4291 - RNA, 1302 nt, Artificial Sequence
  CAA70989 variant
auggucuggaaagucgccgucuuccuauccgucgcccucggcauaggcgccguccccauugacgaccccgaagacggcggcaaacacuggguagucaucguagcaggauccaacggcugguacaacuaccgccaccaagcagacgcaugccacgccuaccaaaucauccacagaaacggcauacccgacgaacaaauugucgucaugauguacgaugacaucgccuacagcgaagacaaccccaccccaggcaucgucauuaaccgcccaaacggcaccgacgucuaccaaggcgucccaaaagacuacacuggcgaagacgucaccccacaaaacuuccucgccguccucagaggagacgccgaagccgucaaaggcauaggcuccggcaaaguccucaaaucaggaccacaagaccacgucuucaucuacuucacagaccaugguuccaccggaauacucgucuucccaaacgaggaccuacacgucaaagaccuuaacgagaccauacacuacauguauaaacacaaaauguaccgcaaaauggucuucuacaucgaagccugcgaaagcggcuccaugaugaaucaccuaccagacaacaucaacguauacgcaaccaccgccgccaaccccagagaauccuccuacgccugcuacuacgacgaaaaacgcuccaccuaccucggcgacugguacuccgucaacuggauggaagauuccgacgucgaagaccucacaaaagaaacacuccacaaacaauaccaccuagucaaaucacacacgaacaccucacacgugaugcaauacggcaacaaaacaaucuccaccaugaaagucaugcaauuucaaggcaugaaacgcaaagccucuucacccgucccccuaccucccguaacacaccuagaccucacacccagcccagacguaccccucaccauuaugaaacgcaaacuaaugaacacuaacgaccucgaagaaucccgacagcucaccgaagaaauccaacgccaccuagacgccaggcaccucaucgaaaaaucaguccgcaaaaucguaucgcuccuagcagccuccgaagccgaaguagaacagcuccucucagaacgcgcaccccuaacaggccacuccugcuaccccgaagcccuccuacacuuccgaacacacugcuucaacuggcacagcccaacuuacgaauacgcccuaagacaccuauacguacucgucaaccucugcgaaaaaccauacccccuacacagaaucaaacucuccauggaccacgucugccuaggccacuacuaa

SEQ ID NO: 4292 - RNA, 1797 nt, Artificial Sequence
  AAL36991 variant
augacccccaucgucaccguccucaucugccucggucucucucuaggcccccgaacacacguccaaaccggcaccauacccaaacccacacuaugggcagaacccgacuccgucaucacccaaggcucccccguaacccuaucuugccaaggcucccucgaagcccaagaguaccgccucuaccgcgaaaagaaaucagccuccuggaucacucguauacgacccgagcuagucaagaacggccaauuucacauccccucaaucaccugggaacauacaggcagauacgguugucaauacuauucccgcgcacgcuggucagaacucuccgacccccuagucuuagucaugacaggagccuaccccaaaccaacucucuccgcacaacccucacccgucgucacaucaggcggccgcguaacauugcagugcgaaucgcaagucgccuucggaggcuucauacugugcaaagaaggcgaagaagaacacccccaaugccuaaacucccaaccccaugcccgcggcucaucccgcgcuaucuuuuccguaggacccgucuccccaaaccgucgcuggagccaccgcugcuacggcuaugaucuaaauucacccuaugucugguccagcccaucagaucuacuagaacuacucguccccggcguauccaaaaagccaucccuauccguacaacccggccccgucgucgcaccaggagaaucucugacccuccaaugcguaucagacguaggauaugaccgauucguccucuacaaagaaggcgaacgcgaccuaagacagcuacccggacgccaaccccaagccggacuuucccaagcuaacuucacccucggccccgucucccgcuccuacggcggccaguaccggugcuauggcgcccauaaccuuucauccgaaugcuccgccccgucagacccucuggacauccuaaucacuggccaaauacgcggcaccccguuuauaucaguccagcccggccccaccguagccuccggcgaaaacgucacccuacuuugccaaucauggcgccaguuccacaccuuccuacuaacuaaagccggugcagcagacgcaccacuacgucuccguucgauccacgaauaccccaaauaccaagccgaguuccccaugagccccgucaccuccgcccacgcagguaccuaccguugcuacggcucacucaacuccgaccccuaccuucucucccacccauccgaaccccuagaacucgucguaucgggucccuccaugggcucauccccaccacccaccggccccaucuccacgcccgccggacccgaagaccaaccccucacaccaaccggcucagacccacaaucgggccucgguagacaccuaggcguaguuaucggcauccucgucgccgucguccuccuucuccuccuacuacuccuucucuuccuaauccucagacaccgcagacaaggcaaacacuggaccuccacccaacgcaaagccgacuuucaacaccccgccggugccgucggccccgaacccaccgacagaggccuccaauggcgauccucacccgcugccgacgcccaagaagaaaaccuauacgccgccgucaaagauacccaaccagaagacggaguagagauggacacccgcgccgccgcauccgaagcaccccaagacgucaccuaugcccaacuccacucccuaacacuacgccggaaagcaaccgaaccuccgcccucccaagaacgugaaccucccgccgaacccuccaucuacgccacccucgccauacacuga

SEQ ID NO: 4293 - RNA, 498 nt, Artificial Sequence
  CCDS6385.2 variant
auggcccuccucgcccuccuccucgucgucgcccucccccgcgucuggacagacgccaaccucaccgcccgccaacgcgaccccgaagacucccaacgcaccgacgaaggcgacaaccgagucuggugccacgucugcgaacgcgaaaacaccuucgaaugccaaaacccccgccgcugcaaauggaccgaacccuacugcgucaucgccgccgucaaaaucuucccccgcuucuucauggucgccaaacaaugcuccgccggcugcgccgcaauggaacgccccaaacccgaagaaaaacgcuuccuccucgaagaacccaugcccuucuucuaccucaaaugcugcaaaauccgcuacugcaaccucgaaggcccccccaucaacucauccgucuucaaagaauacgccggcuccaugggcgaauccugcggcggccucuggcucgccauccuccuccuccucgccuccaucgcagccggccuaucccucuccuaa

SEQ ID NO: 4294 - RNA, 375 nt, Artificial Sequence
  AAA68873 variant
augucgcucgagcaaaagagccagcacuguaaaccggaagagggcuuggacacgcaagaggaagcgcucgggcucgugggcgugcaagcggccacgaccgaggaacaggaagcggucucgagcucaagcccgcucgugcccgggaccuugggcgaggucccggccgcaggcucgcccgggcccuugaaaucgccccagggcgcgagcgcgaucccgaccgcgaucgauuucacgcucuggcgccagagcauaaaagggagcucaaaccaggaagaggaagggcccucgacaucgcccgaucccgagagcguguucagggccgcgcucucgaaaaaggucgcggacuugauccauuucuugcucuugaaauauuga

SEQ ID NO: 4295 - RNA, 957 nt, Artificial Sequence
  AAH02455 variant
augcuacucgggcaaaagagccagcgcuacaaagcagaagagggccuacaagcgcaaggcgaagcccccggacucauggacguacaaauaccaacggcagaggaacagaaagccgcaucgagcucaagcacgcucauaaugggaacacuagaagaagucacggacucaggcucaccaucacccccgcaauccccagagggcgcaagcucgagccugaccgucacagacagcacacucuggagccagagcgacgaagggagcucgagcaacgaagaagaaggaccaucaacaucgccagaccccgcacaccuagaaucacuauuucgcgaggcacuggacgagaaaguggccgagcuggugcgauuccuacuacgaaaguaccagauaaaggaaccggucacgaaagcggaaaugcucgagagcgugaucaaaaacuacaaaaaccacuuccccgacauauuuagcaaggccucggaaugcaugcaagucauauucggaauagacguaaaggaaguagacccggccgggcacucguacauccuagugaccugccuaggacuaucguacgacggccuacuaggagacgaccaaucgaccccgaaaacgggccugcucauaaucgugcucggaaugauccucauggaaggcagcagggcaccggaagaggccauaugggaggcccugagcgucauggggcucuacgacgggcgcgagcacucgguguacuggaagcucagaaaacuacucacgcaagaaugggugcaagagaacuaccucgaauacaggcaagcacccgggagcgacccagugcgcuaugaguuccucuggggcccgcgcgcccucgcagaaacgagcuacguaaagguccuggaacacgucguacgcgugaacgcgcgcguacgcauaagcuacccaucacuacacgaagaagccuugggcgaagaaaagggcgucuga

SEQ ID NO: 4296 - RNA, 1290 nt, Artificial Sequence
  AAH04479 variant
auggaaacucaauuccggcgcggcggacucggcugcagccccgccucaauaaaacgcaaaaaaaaaagagaagacucaggcgacuucggccuccaagucuccaccauguucuccgaagacgacuuccaauccaccgaacgcgccccauacggaccccaacuacaauggucccaagaccucccccgcguucaagucuucagagaacaagccaaccuugaagaccgcagcccccgcagaacacaacgcaucacaggcggcgaacaaguccuaugggguccaaucacccaaaucuucccaaccguccgccccgccgaccucacccgagugauaaugccccucgaacaacgcucucaacacugcaaacccgaagaaggacuccaggcccaagaagaggaccuaggccuugucggagcacaagcccuacaagccgaagaacaggaggccgccuucuucuccagcaccuuaaacgucggcacacuagaagaacuaccagcggccgaaucccccucccccccccaaucaccacaggaagaaucauucagccccaccgccauggacgccaucuucggaucccucucagacgagggcucaggcucccaagaaaaagaaggcccaagcaccucccccgaccucauagaccccgaauccuucucacaagacauccuacacgacaaaaucauagaccucguccaccuacuccuuagaaaauaucgcgucaaaggccucaucaccaaagccgaaaugcugggcucaguaaucaaaaacuacgaagacuacuucccagaaaucuuccgcgaagcguccgucugcaugcaacuccucuucggcauagacgucaaagaggucgaccccaccucacacaguuacguccucgucacaucucucaaccuaagcuacgacggaauccaaugcaacgaacaauccaugcccaaaucaggccuccuaauaauaguccucggcgucaucuucauggaggguaacugcauaccagaagaagucaugugggagguccucucaaucaugggaguauacgcaggccgagaacacuuccucuucggcgaacccaaacgacuacucacccaaaacuggguccaagaaaaauaccuaguauaccgccaaguccccggcacagaccccgcaugcuacgaauuccuauggggcccaagagcacacgccgaaaccuccaaaaugaaaguccuagaauacaucgccaacgcaaacggcagagacccaaccucauacccaagccucuacgaggacgcacuucgagaagaaggcgaaggcguauaa

SEQ ID NO: 4297 - RNA, 1110 nt, Artificial Sequence
  EAW99421 variant
augccacgcgcccccaaacgacaacgcugcaugcccgaagaagaccuccaaucccaaagcgaaacccaaggccuagaaggcgcacaagcaccccucgccguagaagaagacgcaucaucuuccaccagcaccagcuccuccuucccaucauccuuccccuccuccuccuccucuuccuccuccucaugcuacccacuaauccccagcacccccgaagaaguauccgccgacgacgaaaccccaaacccaccccaaucugcccaaaucgccugcuccagccccucuguggucgccucacucccccucgaccaaucagacgaaggcucauccucccaaaaagaagaaucucccucgacccuccaaguucuccccgacucagaaucucuaccccguuccgaaaucgacgaaaaagucaccgaucuaguccaauuccuucucuucaaauaccagaugaaagaaccaaucaccaaagccgaaauucucgaaagcguaaucaaaaacuaugaagaccacuucccccuccucuucuccgaagccuccgaaugcaugcuccuaguuuucggaaucgacgucaaagaagucgacccgaccggccacuccuucguccuaguaaccucccuaggccuaaccuacgacggcaugcucucagacguccaaucaaugccaaaaaccggaauacuaauccucauccuauccaucauauucauagaaggcuacugcacccccgaagaagucaucugggaagcccuaaacaugaugggccuauacgacggcauggaacaccucaucuacggcgaaccacggaaacugcuaacacaagacuggguccaagaaaacuaccucgaauaccgccaaguccccggauccgaccccgcucgauacgaauuucucuggggcccccgcgcccacgcagaaauccgcaaaaugucccuacucaaauuccucgccaaagucaacggauccgacccccgcucauucccccuaugguacgaagaagcccuaaaagacgaagaggaaagagcacaagaccgcaucgccaccaccgacgauaccaccgccauggccuccgccucauccucagccaccggcucauucuccuaccccgaauaa

SEQ ID NO: 4298 - RNA, 945 nt, Artificial Sequence
  AAH03408 variant
augccccuagaacaaagaucccaacauuguaaaccagaagaaggccucgaagcccaaggcgaagcccuaggucuagucggcgcccaagccccagccaccgaagaacaagaaaccgccuccagcagcucaacccucgucgaaguaacccuccgcgaaguccccgccgccgaaucacccuccccaccccacagcccccaaggcgccucaacccuacccaccacaaucaacuacacccucuggagccaauccgacgaaggcucauccaacgaagaacaggaaggccccuccaccuuccccgaccuugaaacauccuuccaagucgcacuaucacgaaaaauggccgaacuuguacacuuccuccuccucaaauaccgcgcccgcgaacccuucacaaaagccgaaauguuaggauccgucauccgcaacuuccaagacuucuuccccgucaucuucuccaaagcaucagaauaccuccaacucgucuucggcaucgaagucgucgaagucguccgcaucggccaccuauacauccucgucacaugccuaggccucuccuaugacggccuccugggcgacaaccaaaucguccccaaaaccggccuacucaucaucguucucgccaucaucgccaaagaaggagacugcgcccccgaagagaaaaucugggaagaacucuccguccucgaagccuccgacggccgcgaagacucaguauucgcccacccccgaaaacuacucacacaagaccucguccaagaaaacuaccuagaauaccgccaaguccccggcuccgacccagccugcuacgaguuccuauggggcccccgcgcccuagucgaaaccuccuacgucaaaguacuacaccacuuacuaaaaaucucaggcggcccccacauauccuacccaccccuacacgaaugggcauuccgcgaaggcgaagaauaa

SEQ ID NO: 4299 - RNA, 930 nt, Artificial Sequence
  AAA03229 variant
augucccucgaacaacgcucacuccacugcaaacccgaagaagcccucgaagcccaacaagaagcccucggccuagucugcguacaagccgcaaccucauccuccagcccccucguccucggaacccucgaagaaguccccacagccggauccaccgacccgccacaauccccucaaggagccuccgccuucccgacaaccauaaacuucacccgacaacgacaacccuccgaaggauccuccucccgcgaagaagaaggcccauccaccuccugcauccucgaaucacucuuccgcgccgucauaaccaagaaagucgcagaccucgucggcuuccuccuccucaaauaccgcgcccgcgaaccagucaccaaagccgaaaugcuagaaucaguaaucaaaaacuacaaacacugcuucccagaaaucuucggcaaagcauccgaaagccuucaacucgucuucggcaucgacguaaaagaagcagaccccaccggccacuccuacgucuuaguaaccugccucggccucuccuacgacggucuccucggcgacaaccaaaucaugcccaaaaccggcuuccuaaucaucguccucgucaugaucgccauggaaggaggccacgcccccgaagaagaaaucugggaagaacucucagucauggaagucuacgacggccgcgaacacucagcguacggcgagccccgcaaacuccucacccaagaccucguccaagaaaaauaccuagaauaccgacaaguacccgacuccgacccagcccgauacgaguuccucuggggcccccgcgcccucgcagaaaccucauacgucaaaguccuagaauacgucaucaaaguauccgcccguguccgcuucuucuuccccucacuacgcgaagccgcccuccgagaagaagaagaaggcguauag

SEQ ID NO: 4300 - RNA, 945 nt, Artificial Sequence
  AAA17729 variant
augccccucgaacaacgcagccaacacugcaaacccgaagaaggccucgaagcccgcggcgaagcccucggccucguaggcgcccaagcccccgcaaccgaagaacaacaaacagccagcagcuccuccacacucgucgaagucacccuuggagaaguccccgccgccgacucccccucacccccccacucaccccaaggcgccucauccuucucaaccaccaucaacuacacccucuggcgacaauccgacgaaggaucaucuaaccaagaagaagaaggcccccgcauguuccccgaccucgaaucagaauuccaagccgccauaucacgaaaaauggucgaacucguccauuuccuucuccucaaauaccgcgcccgcgaacccgucaccaaagcagaaaugcuagaauccguccuacgcaacugccaagacuucuucccagucaucuucuccaaagccuccgaauaccuccaacucgucuucggcauagaagucgucgaaguugucccaauaucccaccucuacauccucgucaccugccuaggacucucauaugacggccuucucggcgacaaccaggucaugcccaaaacuggacuacucauaaucguccuagccaucaucgcuaucgaaggagacugcgcccccgaagaaaaaaucugggaagaacucuccaugcuagaaguuuucgaaggccgcgaagacuccgucuucgcccacccccgcaaacuccucaugcaagaccucguacaagaaaacuaccuagaauaccgccaaguccccggcuccgaccccgccugcuacgaauuccucuggggcccacgagcccuaaucgaaaccuccuacgucaaaguucuccaccacacacucaaaaucggcggagaaccccauauuucauacccaccccuacacgaaagagcccucagagaaggcgaagaauaa

SEQ ID NO: 4301 - RNA, 945 nt, Artificial Sequence
  AAA17446 variant
augccccucgaacaacgcucccaacacugcaaaccagaagaaggccucgaagcccgcggagaagcccucggacucgucggcgcccaagccccagccaccgaagaacaagaagccgccuccuccuccuccacccuagucgaagucacacuaggcgaagucccagccgccgaauccccugaccccccccaaucaccccaaggcgccuccucacuaccaaccaccaugaauuacccacucuggucacaaucauacgaagacuccucaaaccaagaagaggaaggacccuccacauuccccgaccuagaauccgaauuccaagcugcacucucacgaaaagucgcagaacuaguacacuuccuccuccucaaauaccgagcccgagaaccagucaccaaagcugaaaugcucggcucaguaguaggcaacuggcaauacuucuuccccgucaucuucuccaaagccuccucaucccuccaacucguuuucggcaucgaacucauggaagucgacccaaucggccaccucuacaucuucgcaaccugccuaggacuauccuacgacggccuccuaggcgacaaccaaaucaugcccaaagccggccuccucaucaucguucucgccaucauagcccgcgaaggcgacugcgccccagaagaaaaaaucugggaagaacuuuccguccucgaaguauucgaaggccgagaagacucaauccucggcgaccccaaaaaacuccucacccaacacuucguacaagaaaacuaccucgaauaccgacaaguccccggcucagaccccgccugcuacgaauuccucuggggcccccgcgcacucgucgaaacauccuacgucaaaguccuccaccacauggucaaaauauccggcggaccacacaucuccuaucccccccuccacgaauggguccuacgcgaaggcgaagaauag

SEQ ID NO: 4302 - RNA, 954 nt, Artificial Sequence
  EAW99410 variant
augucgagcgaacagaaaagucaacacugcaaaccggaggagggcguggaagcacaagaggaagcgcucgggcucguaggcgcgcaagcacccacgaccgaggaacaagaagcggccguaagcucgagcagcccucuagucccaggcacgcucgaggaagugcccgcagccgagagcgcggggccaccccaaagcccgcaaggggccucggcccugcccacgaccauaucguucacaugcuggaggcaaccgaacgagggcagcagcucgcaagaggaagagggaccgagcacgagcccggacgcggaaucacucuuccgcgaggcacugaguaacaaaguggacgaacucgcgcacuuccuccuacguaaguacagggccaaggagcuagucaccaaagcggaaaugcucgaaagagugaucaaaaacuacaaacggugcuuuccagugauauucggaaaggccucggaaucgcucaagaugauauucgggaucgacgucaaggaaguggaccccgcaucgaacacguacacgcucguaaccugccucgggcuauccuacgacggccugcuaggaaacaaccaaauauucccgaaaacgggccugcucauaaucgugcucggaacaauagccauggaaggggacucagccucggaagaagaaauuugggaggaacuaggcgugaugggugucuacgacgggcgcgagcacacagucuacggcgagcccagaaaacugcuaacgcaagacugggugcaagagaacuaccucgaauacagacaagugcccgggagcaacccagcgcgauacgaguuccucuggggcccgcgcgcgcucgcggaaacgagcuaugucaagguacuggaacacguuguccgaguaaacgcgcgagugcgcauagccuauccaucacucagggaagcagcacuacuagaagaagaagaagggguauag

SEQ ID NO: 4303 - RNA, 954 nt, Artificial Sequence
  AAA68871 variant
augucgagcgaacaaaagagccaacacugcaaaccggaagagggcguagaagcgcaagaggaagcacucggacucgugggcgcgcaagcacccacgaccgaggaacaggaagcggcagugagcucgagcucaccacuggucccgggcacgcucgaagaagugcccgcagccgagagugcgggcccgccccaaagcccgcaaggggccucggcacugcccacaacaauaucauucacgugcuggaggcaaccaaacgagggcagcagcucgcaggaagaagagggcccaagcaccagcccagacgcggaaucacuauuccgagaagcccugagcaacaaagucgacgagcuagcgcacuuccuacugcgcaaauacagggccaaagagcuagucacgaaagcggaaaugcucgaacgagugaucaaaaacuacaaaagaugcuuccccgugaucuucggaaaggcaucagaaucgcucaagaugauauucgggaucgacgucaaagaaguggacccggccucaaacacguacacgcucguaaccugccucgggcucucguacgacggacuacucgggaacaaccaaauauucccgaaaacgggcuuacucauaaucgugcucgggaccauagccauggaaggcgacucggcaucggaagaggaaauaugggaggaauugggcgugaugggggucuacgacggacgagagcacacgguauacggcgagccaaggaaacugcucacgcaagauugggugcaagagaacuaccucgaguacaggcaagugccaggaagcaaucccgcgcgauacgaguuccucugggguccacgcgcacuagccgaaacgagcuacgucaagguacuggaacacgucgugcgcgugaacgcgcgcguacgcauagccuaccccucacuuagggaagcggccuugcuagaagaagaggaaggggucuag

SEQ ID NO: 4304 - RNA, 954 nt, Artificial Sequence
  AAY27261 variant
augucgagcgagcaaaagagccagcacugcaaaccagaagagggcguggaagcgcaagaggaagcgcucgggcucgugggagcgcaagcacccacgacagaggaacaagaagcagcagugagcucgucaucaccccuaguccccggcacacucgaggaagugcccgcggccgagagcgcgggaccgccccagagcccgcaaggggccucagcccuacccacgaccaucagcuucacaugcuggcgacaaccaaacgagggcucgagcucgcaagaggaagaaggcccgagcacgagcccggacgcggaaucgcuauuccgcgaggcacuguccaacaaagucgacgaacucgcgcacuuucuccuacgcaaauaccgagccaaggaacuggucacgaaagcagaaaugcuagagcgaguaauaaagaacuacaaaaggugcuuccccgucaucuucggcaaggcaucggaaucacuaaagaugaucuucgggaucgacgucaaggaaguggacccgaccucaaacacauacacgcucgucacaugccucggacucucguacgacggacuacucgggaacaaccaaauauucccaaaaacaggccugcuaauaaucgugcucggaaccauagccauggaaggagacucagccucggaagaagaaaucugggaggaauugggaguaaugggggucuacgacggacgcgagcacacggucuacggcgagccacgaaaacugcucacgcaagacuggguacaagagaacuaccucgaauacagacaaguccccggaagcaacccagcccgcuacgaguuccucuggggcccacgagcacucgcggaaacgagcuacguaaaaguacuggaacacgucguacgagugaacgcgagagugcgcauagccuaccccucacucagggaagcggcccugcuagaagaagaggaaggggucuag

SEQ ID NO: 4305 - RNA, 945 nt, Artificial Sequence
  BAF82126 variant
augccccucgaacaacgcucccaacacugcaaacccgaagaaggccuugaagcccgcggugaagcccugggccucgucggagcccaagcccccgccacagaagaacaagaagcagcauccagcuccucaacccucgucgaagucacacucggcgaaguccccgccgccgaaagccccgaccccccacaauccccccaaggagccucaucccuccccaccacaaugaacuacccccuauggucccaauccuacgaagacuccuccaaccaagaagaagaaggccccagcaccuuccccgaccucgaaucagaauuccaagccgcccucuccagaaaacucgcuaaauugguccacuuccuccuacucaaauaccgcgcucgagaacccgucaccaaagccgaaaugcuaggcucagucguaggcaacuggcaauacuucuuccccgucaucuucagcaaagccuccgacucccuccaacuugucuucggcauagaacuaauggaagucgaucccauaggccacgucuacaucuucgccacaugccucggccucuccuacgacggccuccucggcgacaaccaaaucaugcccaaaaccggcuuccuaaucaucauccucgccaucaucgcaaaagaaggcgacugcgcuccggaagaaaaaaucugggaagaacucuccguccucgaagucuucgaaggccgcgaagacaucaucuucggggaccccaaaaaacuccucacccaauacuucguacaagaaaacuaccuagaauaccgacaagucccaggcucagaccccgccugcuacgaauuccucuggggcccccgagcccucaucgaaaccuccuacgucaaaguccuccaccacauggucaaaauauccggcggaccccgcauauccuacccccuccuacacgaaugggcccuccgcgaaggagaagaauaa

SEQ ID NO: 4306 - RNA, 945 nt, Artificial Sequence
  AAA19006 variant
augccccucgaacaacgaucccagcacugcaaacccgaagaaggccucgaagcacgcggcgaagcacugggccucgucggcgcacaagcccccgccacagaagaacaagaagccgccagcagcuccucaacacucgucgaagucacccuaggcgaagucccagccgcugaaucccccgaccccccccaaagcccacaaggcgccuccucccuccccaccacaaugaacuacccccucuggucccaaucguacgaagacucauccaaccaagaagaagaaggacccuccaccuuccccgaccucgaaucagaauuccaagccgcacucucccgcaaagucgccaaacucguacacuuccuacuccucaaauaccgagcaagagaacccgucacaaaagccgaaaugcucgguagcguaguaggcaacuggcaauacuucuuccccgucaucuucuccaaagccucagacucccuccaacucgucuucggcaucgaacucauggaagucgaccccaucggccacgucuacaucuucgccaccugccucggccuauccuacgacggccuacuuggcgacaaccaaaucaugcccaaaaccggauuccuaaucaucauccucgccaucauagccaaagagggagacugcgccccagaagaaaaaaucugggaagaacuaucuguacuagaagucuucgagggccgcgaagacucaauauucggcgaccccaaaaaacuccucacccaauacuucguccaagaaaacuaucuagaauaccgacaaguccccggaucagaccccgcaugcuacgaauuccucuggggaccccgcgcccuaaucgaaacaucauacgucaaaguccuacaccacauggucaaaauauccggcggcccaagaauaucauacccacuccuacacgaaugggcccuccgagaaggagaagaauaa

SEQ ID NO: 4307 - RNA, 945 nt, Artificial Sequence
  CAG46567 variant
augccacucgaacaacgcagccaacacugcaaaccugaagaaggccucgaagcccgcggagaagcacucggccuagucggcgcccaagcccccgccaccgaagaacaagaagccgccucuucauccuccacccucguagaagucacacucggcgaagucccugccgccgagagccccgaccccccucaaagcccacaaggcgccuccucccuccccaccacaaugaacuacccccucuggucccaauccuacgaagacucauccaaccaagaagaagaaggccccuccaccuuccccgaccuagaauccgaauuccaagccgcccucucccgaaaagucgccaaacuaguccacuuccuacuucucaaauaccgcgccagagaacccgucaccaaagccgaaaugcuaggcuccgucgucggcaacuggcaauacuucuuccccgucaucuucuccaaagccucagacucccuccaacucgucuucggcaucgaacucauggaaguagaccccaucggccacgucuacaucuucgcaaccugccucggccucucauacgacggccuccuaggcgacaaccaaaucaugcccaaaacaggcuuccucauuaucauccuugccaucaucgccaaagaaggcgacugcgcccccgaagaaaaaaucugggaagaacucuccguccuagaaguuuucgaaggccgcgaagacuccaucuucggagaccccaaaaaacuccucacccaauacuucguccaagaaaacuaccucgaauaccgccaaguaccaggauccgacccagccugcuacgaauuccuauggggcccccgcgcccuaaucgaaaccagcuacgucaaaguacuccaccacaugguuaaaauauccggcggcccccgcaucuccuaccccuuacuccacgaaugggccuuccgugaaggugaagaauaa

SEQ ID NO: 4308 - RNA, 948 nt, Artificial Sequence
  AAA68877 variant
augucccucgaacaacgcagcccccacugcaaacccgacgaagaccuagaagcccaaggagaagaccuaggacucaugggcgcccaagaacccacaggcgaagaagaagaaaccaccuccuccuccgacucaaaagaagaagaaguauccgccgccggauccagcuccccaccacagucaccacaaggcggcgccuccuccuccauaucaguauacuacacacucuggagccaguucgacgaaggaagcucaagccaagaagaggaagaaccaucaucauccgucgaccccgcacaacucgaguucauguuccaagaagcccucaaacucaaagucgcagaacuaguccacuuccuccuacacaaauaccgcgucaaagaacccgucaccaaagccgaaaugcuagaauccgucaucaagaacuacaaacgauacuuccccgucaucuucggaaaagcauccgaauucaugcaagucaucuucggcaccgacgucaaagaagucgaucccgccggccacagcuacauccucgucacggcacugggccuaucaugcgacucaaugcuaggagacggccacuccaugcccaaagccgcccuccucauaaucguccugggcguaauccucacgaaagacaacugcgccccagaagaaguaaucugggaagcccucuccgucaugggcgucuacgucggcaaagaacacauguucuacggcgaaccccggaaacuacucacacaagacuggguacaagaaaacuaccuagaauaccgacaagucccaggauccgaccccgcacacuacgaauuccucuggggcuccaaagcacacgccgaaaccagcuacgaaaaaguaauaaacuaccucgucaugcucaacgcacgcgaaccaaucugcuacccaucccuauacgaagaaguccuaggagaagaacaagaaggcgucuaa

SEQ ID NO: 4309 - RNA, 1044 nt, Artificial Sequence
  AAI01309 variant
augccacgcggccaaaaauccaaacuacgcgccagagaaaaacgccgacaagcacggggcggacuagaagaccuaaucgacgcccucgacauacuagaagaagaagaagaaucacccccaucagcauccgcaugccuaaaagacgucuuccaaucaucccuagacggcgccuccaacaacccacacggccuccgcgaagcccaaagcacaucaaccuccgcaaccgcagccucccacacccgacaccccgaaggcguaaaugaccagauggaagaacgacccaucugcacccaagaccuugaagccacagacagcuucccccgaggacccguagacgaaaaagucaucauucuaguccacuaccuccuguacaaguaccaaaugaaagaacccauaacuaaagccgacaugcuaagaaacgucacccaaauguccaaaucccaauuccccgucauacucucccgagccagcgaacaccucgaacucaucuucggccucgaccuaaaggaaguagaaccuaacaaacacaucuacguccuagucaacaaacucgaccucggcugcgacgccaaacucuccgacgaaaccggcguccccaaaacaggccuacucaugaccguccucggcaucaucuucaccaacggcaacugcgucgccgaagaagaagucuggaaagucuucaacacaaugggccucuacgacggaaucgaacacuucauguucggcgaaccacgaaaacuacuaaccaaagaccucgucaaagaaaacuaccucgaauaccaacaaguucccaacuccgacccaccccgauaccaauuccucuggggccccagagcccacgccgaaaccagcaaaaugaaaguccucgaguuccuagccaaagucaacgacaccgcccccucagaguucagcaacugguacaccgaagcccuucaggacgaagaagaacgcgcccgagcccgagucgcagccaaagcccgagucuccgccacagccggugcucgcagcaaagucaaauccuccaaaagcagccaacuacaauaa

SEQ ID NO: 4310 - RNA, 975 nt, Artificial Sequence
  CCDS43927.1 variant
augucccaggaccaagaauccccgcguugcacccacgaccaacaccuccaaacguucuccgaaacccaaucccucgaagucgcccaagucuccaaagcacucgaaaaaacccuacuaucauccucccacccccuuguccccggaaaacucaaagaagcccccgccgcaaaagcagaauccccccucgaagucccccaaucauucugcucaucaucgauagccgucaccaccaccagcuccuccgaaucagacgaagccuccuccaaccaagaagaagaagacucccccuccuccagcgaagacaccuccgaccccagaaacguccccgcagacgcccucgaccaaaaagucgccuuccuagucaauuucaugcugcacaaaugccaaaugaaaaaacccauaaccaaagccgacaugcuaaaaaucaucaucaaagacgacgaaagccacuucucagaaauacuccuccgcgccucagaacaccuagaaaugaucuucggccucgacgucgucgaagucgauccuaccacccacugcuacggccucuucaucaaacucggccucacauacgacggaaugcuauccggagaaaaaggcguaccaaaaaccggacuccucaucaucguccucggcguaaucuucaugaagggcaaccgcgccacagaagaagaagucugggaaguacugaaccucaccggcguauacucgggaaaaaaacacuucauauucggagaaccccgcaugcuuaucaccaaagacuuugucaaagaaaaauacuuagaauaccaacaagucgccaacucagacccagcacgcuacgaauuccucuggggcccccgcgccaaagccgaaaccucaaaaaugaaaguccucgaauucgucgccaaaguccacggcagcuacccccacucuuuccccagccaauacgcagaagcccucaaagaggaagaagaacgagcccgagcccgcaucuaa

SEQ ID NO: 4311 - RNA, 1011 nt, Artificial Sequence
  CCDS59524.1 variant
augccccgaggacaagcauccaaacgacgagcccgagaaaaacgcagacaagcaagaggcgaagaccaaugccucggcggcgcccaagcaaccgccgccgaaaaagaaaaacuccccagcagcuccagccccgccugccaauccccaccccaauccuucccaaacgccggcaucccacaagaaagccaaagagccagcuaccccuccucgcccgccucagcagucucacucaccagcucggacgaaggagcaaaaggccaaaaaggcgaaagcccaaacucauuccacggcccuuccucauccgaaagcaccggacgcgaccuccucaacaccaaaacaggcgaacucguacaauuccuacuaaacaaauacauccggaaagaacccaucaccagagaagccaugcucaaagucaucaaccgcaaauacaaacaacacuuccccgaaauccuacgccgcagcaccgaaaacguagaagucgucuucggccucuaccucaaagaaauggaccccuccagacaauccuacguccuaguaggaaaacucgacuucccgaaccaaggcucacuuuccgacggaggaggcuucccccuaagcggccuccuaaugguccuacucuccaccauauucaugcauggaaacagagcaaccgaagaagaaaugugggaaugccucaacgcccucggaauguacaaaggcagaaaacacuucaucuacggcgaaccccaagaacuggucacaaaagaccuaguacgcgaaggcuaccuggaauaccaacaagucccauccuccgacccaccccgcuacgaguuccucuggggcccccgcgcccgagcagaaaccuccaaaaugaaaguccucgaguucguggccaaacuaaacgacaccguagccuccacauacaaaucacgcuacgaagaagcccuccgcgaagaagaagaacaagcacgcgcacgagcagucgcccgcgacagcgcccgagccagagcguccaggagcuuccaaccauaa

SEQ ID NO: 4312 - RNA, 1044 nt, Artificial Sequence
  AAC23616 variant
augccacgcggccaaaaaucaaagcuacgcgcccgcgaaaaacgccgaaaagcacgcgaagaaacccaaggccucaaaguacgacacgccaccgcggcagaaaaagaagaaugcccaucgagcucacccguccucggcgacacgcccaccuccucgcccgcagccggcauaccacaaaaaccccaaggcgcaccacccaccaccaccgcggccgcagcagucuccugcaccgaauccgacgaaggcgccaaaugccaaggcgaagaaaacgcaucauucucccaagcaacaaccagcacagaauccuccgucaaagaccccgucgccugggaagccggaaugcucaugcacuuuauccuccgcaaauacaaaaugcgagaacccaucaugaaagccgacaugcucaaagucguagacgagaaauacaaagaccacuucaccgaaauacuaaacggcgccucccgccgccucgaacucguauucggccuagaccucaaagaagacaacccgagcucccacaccuacacgcuagucuccaaacucaaccuaacaaacgacggcaaccuauccaacgacugggacuucccccgcaacggccuucucaugccacuccuaggcguuaucuuccucaaaggcaacuccgcaaccgaagaagaaauauggaaauuuaugaacguacucggagccuacgacggcgaagaacaccuuaucuacggcgaaccccgcaaauucaucacccaagaccucguccaagaaaaauaccucaaauacgaacaaguacccaacuccgacccaccccgcuaccaauuccuauggggcccccgcgccuacgcggaaaccaccaaaaugaaaguccuggaguuccucgccaagaugaacggagcaacccccagagacuuccccucccacuacgaagaagcccugcgagacgaagaagaacgagcccaaguccgaagcuccguacgcgcccgacgccgaacaaccgccaccacauuccgagcccgcucacgcgcccccuucuccaggagcucccaccccauguaa

SEQ ID NO: 4313 - RNA, 960 nt, Artificial Sequence
  AAD10635 variant
augccaagaggccaaaaaucgaaauugcgcgcgcgcgagaaaaggcgcaaggcaagggacgagacccgaggccugaacgugccccaagucacggaagcagaagaggaagaagccccgugcugcagcucgagcguuagcggaggcgcggcaucaagcucgcccgcggcagggauaccacaagagccccaacgggcgccaacaaccgcagccgcggccgcggcaggggucucgagcacgaaaucgaaaaagggcgcgaaaucgcaccagggcgagaaaaacgccucgagcucacaagcaagcacgagcacgaaaucacccucggaagaccccuugaccagaaaaucaggcucgcucgugcaauuccuauuguacaaguacaagaucaagaaaucggucacaaaaggggaaaugcucaaaaucgugggcaagcgcuuccgcgagcacuucccagagauccugaaaaaggccucugaagggcucucggucguguucgggcucgaacucaacaaagugaacccgaacggccacacauacacauucaucgacaaggucgaccucacagacgaggaaucacuacuaagcuccugggacuucccgcgaagaaaacugcuaaugccccuacucggaguaauauuccuaaacggaaacucagccacggaagaggaaauaugggaguuccuaaacaugcucggcgucuaugacggagaagaacacucggucuucggagagcccuggaaacuaaucaccaaagaccucgugcaagagaaauaccucgaauacaagcaaguacccucgagcgacccgccccgcuuccaguuccucuggggcccgcgcgcuuacgcggaaacgagcaaaaugaagguccucgaguuccucgcgaaagugaacggaaccacgccaugcgccuuccccacgcacuacgaagaagcccugaaagacgaagagaaagcaggcguguaa

SEQ ID NO: 4314 - RNA, 1041 nt, Artificial Sequence
  AAD10636 variant
augccccgcggccaaaaauccacacuacacgcacgcgaaaaacggcagcaaacccgcggccaaacccaagaccaucaaggagcccaaaucaccgccaccaacaaaaaaaaagucuccuucuccagcccccucauccucggcgccacaauacaaaaaaaaucagcaggacgcagccgcuccgcccucaaaaaaccccaacgcgcccuguccaccaccaccucaguggacgucuccuacaaaaaauccuacaaaggcgcuaacuccaaaaucgaaaaaaaacaaagcuucagccagggccucuccucaacaguccaaucaagaacugacccccucaucaugaaaacaaacaugcucguacaauuccucauggaaauguacaaaaugaaaaaacccaucaugaaagcagacaugcucaaaaucguccaaaaaucacacaaaaacugcuuuccagaaauccuaaaaaaagccagcuucaacauggaaguagucuucggcgucgaccucaaaaaagucgacuccaccaaagacuccuacguccuagucagcaaaauggaccuccccaacaacggaacggucacccgcggccgcggcuuccccaaaaccggacuccuacucaaccuccuaggcgucaucuucaugaaaggcaacugcgccacagaagaaaagaucugggaauuccucaacaagaugcgcauauacgacggcaaaaaacacuucaucuucggcgaaccccgaaaacucaucacacaagaccuggucaaacucaaauacuuagaauaccgccaaguccccaacucaaaccccgcccgcuacgaauuccucuggggcccccgcgcacacgccgaaacaagcaaaaugaaaguccucgaauucugggccaaagucaacaaaaccguccccuccgcuuuccaauucugguacgaagaagcccuccgagacgaagaagaacgcguccaagcagccgccaugcucaaugacggcuccucggccaugggccgcaaaugcagcaaagccaaagccuccagcuccucccacgccuaa

SEQ ID NO: 4315 - RNA, 1041 nt, Artificial Sequence
  AAC23619 variant
augccccgaggccaaaaaucaaaacuacgagcccgcgaaaaaagacaacgaacacgcggccaaacccaagaccucaaaguaggccaacccaccgcagccgaaaaagaagaauccccauccucguccucauccguccuccgcgacaccgccuccagcagccuugccuucggcaucccccaagaaccgcaacgcgaaccccccaccaccucggccgcagccgccauguccugcaccggcuccgacaaaggcgacgaaucccaagacgaagaaaacgccuccucaucccaagccucaaccuccaccgaacgaagccucaaagacucccuaacccggaaaacaaaaaugcuaguacaauuccuccucuacaaauacaaaaugaaagaaccuaccaccaaagccgaaaugcucaaaaucaucucaaaaaaauacaaagaacacuuccccgaaaucuuccgcaaagucucccaacgaaccgaacucguauucggacucgcccucaaagaagucaacccaacaacccacuccuacauccucgucagcaugcucggccccaacgacggcaaccaaagcucugcauggacccucccccgcaacggucuccucaugccacuccuaucggucauauuccuaaacggcaacugcgcccgagaagaagaaaucugggaauuccucaacaugcucggaaucuacgacggcaaacgccaccucaucuucggcgaaccccgcaaacucaucacccaagaccuaguccaagaaaaauaccuugaauaccaacaagucccuaacucagaccccccucgauaccaauuccucuggggcccccgcgcccacgccgaaacuuccaaaaugaaaguccucgaauuccucgcaaaagucaacgacaccaccccaaacaacuucccacuccucuacgaagaagcucuccgcgacgaagaagaacgcgcuggcgcacgcccacgagucgcagcccgccggggcacaacagccaugaccagcgccuacucccgcgccaccagcagcagcagcucacaacccauguaa

SEQ ID NO: 4316 - RNA, 828 nt, Artificial Sequence
  CCDS65233.1 variant
augaccucagccggcgucuucaacgcaggaucagacgaacgugccaacucccgcgacgaagaauaccccugcagcuccgaagucucccccuccaccgaauccagcugcuccaacuucaucaacauaaaagucggccuacucgaacaauuccuccuguacaaauucaaaaugaaacaacgaauccucaaagaagacaugcucaaaaucgucaacccccgcuaccaaaaccaguucgccgaaauccaccgccgcgccuccgaacacauagaagucgucuucgcagucgaccucaaagaagucaaccccaccugccaccuauacgaccucgucagcaaacucaaacuccccaacaacggccgaauccacgucggcaaaguccuccccaaaaccggccuccucaugaccuuccucgucguaaucuuccucaaaggcaacugcgccaacaaagaagacaccuggaaauuccuagacaugaugcaaaucuacgacgguaaaaaauacuacaucuacggcgaaccccgaaaacuaaucacccaagacuucguacgccucaccuaccucgaauaccaccaagucccaugcuccuaccccgcccacuaccaauuccucuggggcccacgagccuacaccgaaaccuccaaaaugaaaguccucgaauaccucgccaaaguaaacgacaucgcccccggcgcauuuuccucacaauacgaagaagcccuccaagacgaagaggaaucccccucacaacgaugcucccgcaacuggcacuacugcuccggccaagacugccuacgagccaaauucuccuccuucucccaacccuacuaa

SEQ ID NO: 4317 - RNA, 1224 nt, Artificial Sequence
  AAH67286 variant
augcccagaggccacaaaucaaaacugcgaacaugcgaaaaaaggcaggaaaccaacggccaaccccaaggacugaccgggccccaagcaacagcagaaaaacaagaagagagccacaguuccagcucaagcuccagagccugucuaggcgauugcagaagauccuccgacgcaucgaucccccaagagagccagggagucagcccaaccggaagccccgacgcaguuguuuccuacagcaaaagcgacgucgcagccaacggccaagacgaaaaaucccccucaaccucccgcgaugccucggucccacaagaaagccaaggcgccagcccaaccggaucccccgacgcuggcgucagcggcagcaaauacgacgucgccgccaacggccaagacgagaaaucgccauccaccucacacgacguaucagucccucaagaaagccaaggcgcaagcccaacaggauccccagacgcaggaguaagcggaagcaaauacgacguagccgcagagggcgaggacgaagaauccguaucagccucccaaaaagccauaaucuucaaacgccucuccaaagacgccgugaagaaaaaagcaugcacacucgcacaauuccuccaaaaaaaauucgaaaaaaaagaauccauucuaaaagcagacaugcucaaaugcguacgacgagaauacaaacccuacuucccacagauccuaaacaggaccucccaacaccucguagucgcguucgggguagaacuaaaagaaauggauuccagcggcgaaucauacacacucgucuccaaacucggccucccaagcgagggcauccucucgggcgacaacgcacuccccaaaucaggccuacucaugagccuccuagucguaauauucaugaacggaaacugcgccacagaagaagaagugugggaauucuugggccuccucggaauauacgacggaauccuacacucgaucuacggcgacgcccgaaaaaucaucacagaagaccucgugcaagacaaauacguaguguacagacaaguaugcaacagcgaccccccaugcuacgaauuucuauggggcccacgcgcguacgcggaaacgaccaaaaugaggguccugcgcguacucgcagacucaagcaacacaucacccggacuauacccccaucucuacgaagacgcccuaaucgacgaagucgaaagagcccuacgccuacgcgcauaa

SEQ ID NO: 4318 - RNA, 3429 nt, Artificial Sequence
  CCDS35417.1 variant
augggcgacaaagacaugccaacagccggaaugcccucccuccugcaaucuucaagugaaucgccccaaucaugccccgagggagaagacucccagagcccccuccaaaucccucaauccucccccgaaucugaugacacucuauacccccuacagaguccgcagucccgcuccgaaggcgaagacagcuccgacccccuccaacgcccucccgaaggcaaagacucccaaucuccccuucaaauuccacaaucuucaccugaaggcgacgacacucagucacccuuacaaaacagccaaucaucccccgagggcaaagauucacuaucaccuuuggagaucucccaaucuccucccgaaggagaggacguccaauccccucuccagaaccccgccucaucuuucuucucuuccgcacuucuuagcauauuccaaucgucucccgaauccacacaguccccauuugaaggcuuuccccagucuguccuacagauccccguaucggcagcuuccucaucaacccucguuuccauuuuccaaagcagcccagagucaacccaaucccccuucgaaggcuucccccaaucgccccuucaaauccccguuucccgcuccuuuuccuccacccuauuguccauauuccaaucaucacccgaacguacccaauccacauuugaaggcuucgcccagucuccccuacaaauucccguuuccccaucaucaucauccacacuauuaucauuauuccagucauucagcgaacgcacccaguccaccuucgaaggauucgcgcagaguucgcuccaaauacccgucucccccucuuucuccuccacucucgucuccuuauuucaauccuccccagaacguacccaaaguaccuuugaggguuucccccagucaccccuacagaucccagucagcuccucgucuucaagcacccugcucucucucuuucaauccucacccgaacguacacauucaacuuucgaggguuucccccaaucccuccuccaaaucccuaugacuucuuccuucagcagcacacuccuaucaauauuucaauccucccccgaguccgcccaauccacauuugaggguuucccacaaucaccacuccaaauccccggcucuccuucauuuucauccacacuccugucucuauuccaaucaucuccagaacgaacccacuccacauuugaagguuucccccaaucgccccuccaaaucccaaugacaucuuccuucuccagcacacuacucucuauacuccaauccuccccugaaucagcucaaucagcauuugagggauucccccaaucuccacuccaaaucccuguaucauccuccuuuuccuauacuuuacucucucucuuucaaucuucuccagaaagaacucacuccaccuuugaaggauucccacaaucuccauuacaaauuccagucuccucuuccucguccucuaguacacuacucuccuuauuucaauccucgcccgaaugcacucagucuacauuugaaggauucccccagucaccucuacaaauaccucaaucacccccagaaggcgaaaauacccacuccccucuacagauugucccaucguuaccggagugggaagacagccuuucaccucacuacuucccccaaucaccaccucaaggcgaagacucccucaguccccacuacuuuccucaauccccuccgcaaggagaagacucccucucuccccacuacuuuccccaauccccacaaggagaagacucccuguccccacacuacuucccccaauccccaccgcaaggugaggacucaauguccccgcucuacuucccacaauccccacuacagggagaagaguuccaauccucccuccaaucacccguguccaucuguuccuccuccaccccuuccagccucccgcaauccuuccccgaauccucacagucaccuccggaaggacccguccaaucgccccuucacuccccacaauccccgcccgaggguaugcauucucaauccccucuccaaucucccgaaucagcacccgaaggcgaagacucucuaucgccccuccaaauuccccaaagucccuuagaaggggaagacucucuuucgucccuccauuuuccccagucaccaccggaaugggaggacucucucagcccccuccauuucccccaguucccuccccaaggcgaagacuuccaauccucccuacaaucacccgucuccauuugcagcagcucgaccucucuaucacuaccccaauccuuccccgaaucaccccaaucgcccccggaaggacccgcacagucaccacuacaacggcccgucuccuccuuuuucucauauacccuugcuucccuccuccaguccucccaugaaucuccccagucacccccagaagguccggcccaguccccacuccaaucccccguauccucauuuccaucguccaccagcucgucacucagccaauccucucccguauccagcuuuccuuccuccacuucauccagccugucaaaaucaucccccgaaucaccucuacaauccccugucaucucguucuccucaucuacaucacuuucccccuuuagcgaagaguccuccaguccgguagacgaauacacaucuuccagcgacacccuccucgaaucugacucgcuaacagauagcgaaucacucaucgagucagagccccuauucaccuacacucuagaugaaaaaguggaugaacucgcucgcuuccuucuccuuaaauaccaagucaagcaacccauuacuaaggccgaaaugcucacaaaugucaucucccgauacaccggcuacuucccaguuaucuuucguaaagcccgagaguucaucgaaauucuauucggcaucucccuccgagaaguagaccccgacgacucauacguguuugucaauacccuagaucuaaccuccgaaggcugcuuauccgacgaacaaggcaugagccagaacagacuccucauccuaauccuaucaauuauauucauaaagggcaccuacgcgucugaagagguaauuugggacguacucucuggcaucggcguacgugccggccgcgagcacuuugcguucggcgaaccccgcgaacuccuuacaaaagucuggguucaggaacacuaccuggaauacagagaaguccccaauucaucuccaccccguuaugaguuccucuggggcccccgcgcacauagcgaagucaucaaacgcaaaguugucgaguucuuggcuaugcucaaaaacacaguucccaucaccuuccccucaucauacaaagacgcacuaaaggauguagaagaacgagcccaagccauaauagacaccaccgacgacuccaccgcaaccgaaagcgcaaguagcuccgucaugagccccuccuucucuuccgaauaa

SEQ ID NO: 4319 - RNA, 1122 nt, Artificial Sequence
  AAF07210 variant
augccacccguccccggaguacccuuccgcaacgucgacaacgacucucccaccuccgucgaacuugaagacugggucgacgcccaacacccaacagacgaagaagaagaagaagccuccucggccucaucaacacucuaucucgucuucucgcccucauccuucagcaccuccuccagccucauacuaggcggccccgaagaagaagaagucccaucaggcgucaucccaaaccucacagaauccaucccaucaucaccaccccaaggcccuccccaaggccccagccaaucaccccucuccuccugcugcucaucauucucaugguccuccuucuccgaagaauccucaucacaaaaaggcgaagacaccggaacaugccaaggacuccccgacuccgaaucauccuucaccuacacccucgacgaaaaaguagccgagcucgucgaguuccuccuccucaaauacgaagccgaagaacccgucaccgaagcagaaaugcuuaugaucguuaucaaauacaaagacuacuuccccgucauccucaaacgcgccagagaguucauggaacuccucuucggacucgcccuaaucgaaguaggacccgaccacuucugcgucuucgccaacacagucggucucaccgacgaaggcuccgacgacgaaggcaugcccgaaaacucacuccucauaauaauccucucagucaucuucaucaaaggcaacugcgccuccgaagaagucaucugggaaguacucaacgccgucggcgucuacgccggccgagaacacuucgucuacggcgaaccacgagaacuccucacaaaagucuggguccaaggacacuaccucgaauaccgcgaaguuccccacuccucuccacccuacuacgaguuccucuggggacccagagcccacuccgaaagcaucaaaaagaaaguucucgaguuccucgccaaacuaaacaacacaguaccauccuccuucccauccugguacaaagacgcccugaaagacgucgaagaacgcguccaggccacuaucgacacagccgacgacgcaaccguaauggccuccgaaucccucucagucauguccucaaacguauccuucucagaauaa

SEQ ID NO: 4320 - RNA, 1932 nt, Artificial Sequence
  AAM08355 variant
augcuccuccccugccacuggguauuagacgccaccuucuccgauggcucgcucggucaaugggucaaaaauaccugcgcaaccuaugcucucucuccagucguccucccaccccaaccccaaccccgaaagaaagccaccgacaaagauuauuccgccuuucaccuaggacaccuccgagaaguccgucucuuccuccgaggcggcacauccgaccaacgcauggacucacucguccuaugucccacuuacuucaaacucuggcguacccuauccggaagccccggccuacaacucagcgaccuccacuuuggcucacaacccgaaggcaaauucucacuaaggcgcgccgucuccgucaaacaacgagaggaaccccaggacuggccccuaaacgaaaaacgaacccuauggaaagauuccgaucuccccacauggcgccgaggaaccggcuacacacucucccuucccgcugucagccccggcaaacgacuauggggagaaaaagccggaucccuacccgaaagcgagccacucuucacuuacacccucgacgaaaaaguagacaaacucguacaguuccuacugcucaaauaccaggcaaaagagccucuaacccgcgccgaaaugcaaaugaacgucaucaacaccuacaccggcuacuuccccaugaucuuccgcaaagcccgcgaguucaucgaaauccucuucggcaucucccucacagaaguagaucccgaccacuucuacgucuucgucaauacacuagaccuaaccugcgaagggucacucuccgaugaacaaggcaugccccaaaaccgacuucuaauccucauacuuucaguaauuuucaucaagggaaacugcgcguccgaagaaguaauaugggaaguucuaaacgccaucggcccauggucugcccucgccggcuuugccgacguacuaucccgacuagcccucugggaaagcgaaggacccgaagccuucugcgaagagucaggacuccgcuccgccgagggauccguccuagaccuagcuaacccccaaggacuggccggacaccgccaagaagacgguagacgaggacuuaccgaggcuucaccccaacagaaaaagggaggcgaagacgaagacaugcccgcggcaggcaugccaccacucccacaauccccacccgaaauacccccucaaggcccacccaaaaucuccccacaaggcccaccccaauccccaccccaaucuccccucgacuccugcagcaguccccuccucuggacccgccuagacgaagaauccucauccgaagaagaagacacagccaccuggcacgcccuacccgaaagcgaaucacucccccgauacgcccucgacgaaaaaguagccgaacucguccaauuccuacuacuaaaauaccaaaccaaagaacccguaacuaaagccgaaaugcucacuacaguaaucaaaaaguacaaagacuacuucccuaugauauucgggaaagcccacgaguucaucgaacuaaucuucggcauagcccucaccgacauggaccccgacaaccacuccuacuuuuucgaagacacccucgaccucaccuacgaaggcagccuaaucgacgaccaaggaaugccaaagaacugccuccucauccuuauccuauccaugaucuucaucaaaggcucuugcguacccgaagaagucaucugggaaguccucuccgccauaggacccauccaacguccagcccgcgaagugcucgaguuccuauccaagcucuccagcauuaucccaucggccuuccccucaugguacauggacgcucucaaagacauggaagaccgugcacaagccaucauagacaccaccgacgacgccaccgcaauggcauccgcaagcccauccguaaugucuacaaacuucugccccgaauga

SEQ ID NO: 4321 - RNA, 2337 nt, Artificial Sequence
  AAG23757 variant
auggcacaaaagauggacugcggcgcaggccuccuaggauuccaggccgaggcuuccguugaagacuccgcccugcucaugcaaacacuuauggaagccauacagaucuccgaagcuccacccaccaaccaagcgacagccgcagcaucaccacaauccucccaaccaccaacagcgaacgagauggcagacauccaagucagcgccgcagcagcccgaccaaaaucagcauucaaaguacaaaacgcaacaaccaaaggccccaacggagucuacgacuucagucaagcccacaacgcaaaggacgucccaaacacccaaccaaaagcggcguucaaaucccaaaaugcaacacccaaaggccccaacgcagccuacgacuucucccaagcagccaccacaggcgaacuagccgcaaacaaaucagagauggccuucaaagcccaaaacgcaacaaccaaagucggaccaaacgccacuuacaacuucucacaaagccucaacgccaacgaccucgccaacucccgcccuaaaaccccauucaaggcauggaacgauaccaccaaagcacccaccgccgacacgcaaacccaaaacgucaaccaagcaaaaauggcaacaucacaggcagacaucgaaaccgaucccggaaucagcgaacccgacggcgcaaccgcccaaaccucagcugacggcucacaagcacaaaaccucgaguccagaacaauaauccgaggcaaacgcacaagaaaaauaaauaaucugaacgucgaagaaaacuccuccggcgaucaacgacgcgccccucucgccgcugggaccuggcguucagcccccguccccgugaccacccaaaacccgccaggcgcaccacccaacguccuuuggcaaacuccccucgccuggcagaaccccucuggauggcaaaaccaaaccgcacgacaaaccccacccgcacgacaaucaccacccgccagacaaaccccgcccgcauggcagaaccccguugcauggcaaaaucccguuaucuggcccaacccagucauuuggcaaaaccccgucauauggcccaacccaaucguauggccuggccccgucguauggcccaacccacucgcuuggcagaacccacccggcuggcaaaccccacccggcuggcagacaccacccggauggcaaggaccgcccgacuggcaaggacccccggauuggccacucccacccgacuggccucuaccucccgauuggccccuccccacagacuggccacucccucccgacuggauccccgccgacuggcccaucccacccgacuggcaaaaccucagacccucacccaaccuacgacccucacccaacucccgagccucacaaaaccccggcgcagcacaaccacgcgacgucgcccuacuacaagaacgcgccaacaaacuggucaaauaccucaugcuaaaagacuacaccaaagucccaaucaaacgguccgaaaugcucagggacaucauccgagaauacacagacgucuaccccgaaaucauagaaagagccugcuuuguauuagaaaagaaguucggaauccaauuaaaggaaaucgacaaagaggaacaucucuacauccuaauaagcaccccagaaucacuagccgggauacucggcacuacaaaagacaccccaaaacucggccuacuacucgucauccucggcgucauauuuaugaacggcaaccgggccucagaagcaguucuaugggaagcacuacgaaaaaugggacuccgacccggcguacgacacccccuccuuggagaccuucgcaaacuccucaccuacgaguucgucaaacaaaaauacuuagacuaccgacgcguccccaacaguaaucccccagaauacgaauuucuauggggucuacgauccuaccacgaaacgagcaagaugaagguacucagauucauagcugaagugcagaaaagagacccacgcgacuggacugcucaauucauggaggccgccgacgaagcgcuagacgcccucgacgccgcagcagccgaggcagaagcaagggcagaggccagaacccguaugggcaucggggacgaagccguuuccggccccugguccugggacgacaucgaguucgaacuccuaacgugggacgaagaaggagacuucggcgaccccuggucacgaaucccauucacauucugggccagauaccaccaaaacgcacgaagcagauucccccaaaccuucgccggccccaucauaggcccaggaggaaccgccucagccaacuucgcugcaaacuucggagcuaucggcuucuuuuggguagaauaa

SEQ ID NO: 4322 - RNA, 1821 nt, Artificial Sequence
  AAD28598 variant
augagcgacacgucagaauccggagcaggccucacgagauuccaagcagaagcgucagaaaaagacagcuccagcaugaugcaaacacuacucaccguaacccaaaacgucgaaguacccgagacacccaaagcauccaaagcgcuagaagucuccgaagacgucaaaguaagcaaagcaucaggaguaagcaaggccacagaaguauccaaaaccccggaagcaagagaagccccagccacacaagccagcagcaccacucagcuaacagacacgcaaguccuggcagccgaaaacaaaagccuagccgccgacacaaagaaacaaaacgcagacccgcaagcaguaacaaugccagcaaccgaaacgaagaaaguaucacacgucgcagacaccaaaguaaacacaaaagcacaagaaacagaagcagccccgucccaagccccugccgacgaaccagaaccagaaagcgccgcagcccaaucccaagaaaaccaagacacccgcccaaaagucaaggcaaagaaagcacgcaaagugaaacaccuagacggagaagaagacggaucuucagaccaaagccaagcaaguggcacaacaggcggccgcagaguaagcaaagcccuaauggcaagcauggcacgacgggcaagucgaggaccaauagccuucugggcacggagagccagcagaaccaggcuagccgccugggcaagaagggcacuccuuagccugcgaagccccaaagcaagacgagggaaggcacgccgcagagcagccaaacuucagagcagccaagagccagaagcaccaccacccagagauguagcgcuacuccaagggagagcgaacgaccuagucaaauaccuccuagcgaaagaccagaccaaaauacccaucaaaagaucagacaugcuaaaggacauaauaaaggaauacaccgacguauaccccgaaaucauagaacgagccggauacagccuggaaaaagucuucggcauccaacucaaagaaauagacaaaaacgaccaccucuacauccuccugagcacccuggaaccaacagacgccgggauacucggaacgacgaaagacagccccaaauuaggccuacuaaugguccuacugucgauaaucuucaugaacggcaaccgcagcucagaagcaguaauaugggaaguccugcgcaaacuaggccuacgacccggcauccaccauucacucuucggcgacguaaagaaacucaucacagacgaauuuguaaaacaaaaauaccuagacuacgcacggguccccaacagcaacccucccgaauacgaguucuucuggggccuacgcucauacuacgaaaccagcaagaugaaaguccuaaaauucgcaugcaaaguacagaagaaagaccccaaagagugggccgcacaauacagagaagcaauggaagccgaccuuaaagcagcagcagaagccgccgccgaggcaaaagcacgcgcagaaauccgagcaagaaugggaauaggacucggaucagaaaacgccgcgggcccaugcaauugggacgaagcagacauagggccaugggcaaaagcccgcauacaagcgggugcagaagccaaagcaaaagcacaagaaagcggcagcgccagcacaggcgcaagcacaagcacaaacaacagcgcgagcgcauccgcaagcacaucaggaggcuucagcgccggggcaucacucacagcaacacuaaccuucggccucuucgccggccucggaggagccggagccagcacauccggaucaagcggcgcaugcggauucucauacaaauaa

SEQ ID NO: 4323 - RNA, 2226 nt, Artificial Sequence
  AAH63838 variant
auggcagaaggcagcuucagcguccaauccgaaagcuacuccguagaggacauggacgaaggcuccgacgaggucggagaagaagaaauggucgagggcaacgacuacgaagaguucggcgcauucggcggguacggcacccugacaucguucgacauacacauacucagagcguucggcagccuagguccaggacugcgcauacucucaaacgaacccugggaacuagaaaacccugugcucgcacaaacccuagucgaagcgcuacaacucgaccccgaaacccuagccaaugaaacggcagcccgagcagcuaacguagcgcgcgcagcagcaagcaaccgugcggcccgagccgcagccgcagcagcuagaacagccuucagccaggucgucgccucucaccgugucgccaccccacaaguaagcggcgaagacacacaacccaccacauacgccgcagaagcccaaggacccacccccgaaccaccacuagcaaguccgcagacgagccagaugcuagucaccagcaagauggcagccccagaagcacccgcaaccucggcgcagagccaaacuggcucccccgcccaggaagcagccacagaaggcccaucgucagcaugcgcguucagccaagcgccaugugcucgggaaguagacgcaaacagaccaucgacagcauuccuaggacaaaacgacguauuugacuuuacccaacccgcaggcguaucagggauggcauucccacgaccaaagcggccagcaccagcccaagaggcagcaacagaaggaccaagcgcagcaucgggcguuccucaaacaggacccgggagagaagucgcggcaacccgccccaaaacuacaaaauccggaaaagcacucgcaaaaacacgcugggucgaaccacagaauguggucgcugcagcagcagccaaagcgaaaauggccaccuccauucccgagccagagggcgcagccgcggcaaccgcccagcacucagccgagccaugggccagaaugggcgguaaacgaacaaagaaaagcaaacaccuggaugacgaauacgaaagcagcgaagaagaaagagaaacucccgcaguacccccaaccuggcgcgcgucccaacccucacucaccgucagggcacaacuugcgccacgacccccgauggcaccacgaagccaaaucccaucgagacauguccuaugccucccgcccaggaacguaacccuccuucaagaaagagccaacaaauuagucaaauaccucaugauaaaagacuacaagaaaauacccaucaaacgagccgacaugcuaaaagacgucauaagagaauacgacgaacacuucccagaaauaauagaacgagcaacauacacccuagaaaagaaauucggaauacaccugaaagaaauagacaaagaagaacaccuuuacauacucgucugcacaagagacagcagcgcccgccuacuagguaaaacaaaagacacgccacgucuaucacuacuccucgucauccucggaguaauauucaugaacgggaacagagccuccgaagcaguccuaugggaagcacuaagaaaaaugggacuccgacccgggguccgccacccauuccucggcgaccuaaggaaauuaaucacggacgacuucgugaaacagaaauaccucgaauacaaaaagauccccaacagcaaucccccggaauacgaguuccuguggggccuccgcgcucgacacgaaaccuccaagaugcggguccuccgcuucauagcgcaaaaccaaaaccgcgaccccagagaauggaaagcacacuuccucgaggccgucgacgacgccuuuaaaacaauggacguggacauggcggaagaacacgccagagcacaaaugcgcgcccaaaugaacauuggcgacgaggcacuaauaggcagauggucuugggacgacauccaaguagaauuacuaaccugggacgaagacggcgacuucggcgaugcaugggcacgcauuccauucgccuuuugggcccgauaccaccaauacauacucaauagcaaccgcgcgaaccgccgagcaaccuggcgagcaggcgucaguucaggcacuaacggcggcgcaagcacgagcguacucgauggacccagcaccagcucgaccauacgcacccggaacgccgcacgagcaggagcgagcuuuuucucuuggauccaacaccgguag

SEQ ID NO: 4324 - RNA, 1122 nt, Artificial Sequence
  CAG33449 variant
augccccccguucccgguguccccuuccgaaacgucgacaacgacucacccaccucugucgaacucgaagacugggucgacgcacaacaccccaccgacgaagaagaagaagaggccuccucagccucauccacccucuaccucgucuucucccccuccagcuucuccaccuccuccucccucauacuuggcggaccagaagaagaagaaguacccuccggaguaauccccaaccucacagaauccauacccuccucccccccccaaggacccccccaaggcccaucccaauccccccuuuccucaugcugcuccuccuucuccugguccuccuucucugaagaaucauccucccaaaaaggcgaggacaccggcaccugccaaggccuaccagacuccgaauccucauucaccuacacccucgacgaaaaagucgccgaacucguagaauuccuacuacucaaauacgaagcagaagaacccgucaccgaagccgagaugcucaugaucgucaucaaauacaaagacuacuuccccgucauccuuaaacgcgcccgcgaauucauggaacuccucuucggccuagcacucaucgaagucggccccgaccacuucugcguauucgccaacaccgucggccuaacagacgaaggcucagacgacgaaggcaugcccgaaaacucccuccucaucaucauacucucaguaauauucaucaaaggcaacugcgcaucagaagaggucaucugggaaguccucaacgccguuggcgucuacgccggacgagaacacuucgucuacggcgaaccccgagagcuacugacaaaagucuggguccaaggccacuaccuagaauaccgcgaagucccccacucaucuccccccuacuacgaauuccucuggggcccccgcgcccacucagaaucaaucaaaaaaaaaguccucgaauuccuagccaagcuaaacaacaccguccccuccuccuuccccuccugguacaaagacgccuuaaaagacgucgaagaacgcguacaagcaacaaucgacaccgccgacgacgcaaccguaauggccuccgaaucccucuccgucaugucgucuaacguaucuuucucagacuaa

SEQ ID NO: 4325 - RNA, 2874 nt, Artificial Sequence
  AAM08354 variant
augucccucguaucccagaauagccgccgacgcaggcgcaggguagccaaagccacugcccauaauaguucauggggcgaaaugcaagcgccaaacgccccaggccuacccgcagacguaccgggaagcgacgucccacaaggacccucagacagccaaauccuacaaggccugugcgcguccgagggaccgucuacgagcguacuaccaaccucagcagagggcccuagcaccuucgucccacccaccaucagcgaggcuucauccgccagcggacaaccaacaaucagcgaaggaccaggcacuucaguacuaccuaccccauccgaaggacucaguacauccgggccaccaaccauauccaaaggcuuaugcacuucagucacccuggcagcuagugaggguagaaauaccagcagacccccgacauccucagaagaaccgagcacauccguucccccaacugcgucugaaguccccuccacgagccuacccccaacacccggcgaaggcacaucaacauccguacccccuacugcauacgaaggacccuccacaagcgucguccccaccccagacgaagggccauccacaagcguccuuccaacccccggagaaggccccggaaccagcguaccgcucgcagcaacugaaggccuauccaccucagugcaagccacucccgacgagggccccagcaccucgguaccucccaccgccaccgaaggccucagcaccccaguaccacccaccagagaugaaggacccagcacaucuguaccagcaacccccggagaaggccccuccaccuccguccuaccggcugccuccgacggacaguccaucucucuuguaccaacccggggaaaaggcucaagcaccucaguuccacccaccgcaacagaaggccuaaguacuagcguucaaccaaccgccggcgagggcucgucaaccuccguaccacccacccccgggggcggccucuccaccucuguaccucccaccgcgaccgaagaauuaagcacaucaguacccccaacaccaggcgaagggccgucgacuuccguccucccuauaccgggggaaggacuguccaccagcgucccuccaacagcauccgacggcuccgacaccagcguacccccaacuccaggggaaggagccuccacacucguacaaccaacggccccugacggccccgguuccagcguacucccaaacccgggcgagggccccucuacacuuuucaguucauccgcaagcguggaccgaaacccaagcaaaugcucccucguucugcccucuccaagagucaccaaagccagcgucgauuccgauagcgagggcccaaaaggcgcagaaggcccaaucgaguucgaaguacuccgcgacugcgagucaccuaacucaaucucgauaaugggacuaaacaccucccgaguagcuauaacccucaagccccaagacccaauggaacaaaaugucgccgaacugcuccaauuccuucucguaaaggaucaaucaaaguacccgauacgagaauccgaaaugagagaguacaucgucaaggaauaccgcaaccaguucccggaaauacuucgacgagcugccgcccaccucgaaugcaucuuucgauucgaacuacgcgaacucgacccggaagcccacacauacauccuccuaaacaaacuaggccccgucccuuuugaaggcuuagaagaguccccgaacggaccaaaaaugggacuccucaugaugauccuaggacaaauauuccucaacgguaaccaagccaaagaagcagaaaucugggaaaugcucuggcgcaugggcgugcagcgcgaacgacgccucagcauauucggcaacccaaaacgccuucuguccguagaguucgucuggcagagauaccucgacuaccgaccugucaccgauuguaaaccagucgaauacgaguucuucuggggcccccgcucccaccucgaaaccaccaaaaugaaaauacuaaaauuuauggccaaaaucuauaacaaagacccaauggacuggccagaaaaguacaacgaagcauuagaagaagacgccgcacgcgcauucgccgaaggauggcaagccuuaccccacuucagacgcccauucuucgaagaagcggcagccgagguaccauccccugacucugaaguaucuucauacucgaguaaauaugcaccccacuccuggcccgagucccgacuagaaucuaaagcacgaaaacucguacagcuauuucuacuaauggacagcacaaaacuacccauaccaaagaaagguauucuauacuauaucggacgcgaaugcuccaaaguguucccggaccuacuaaaccgcgcagcaagaaccuuaaaccacgucuacggaaccgaacuggucguucucgaccccagaaaccacuccuacacuuuauacaaccgacgcgaaauggaagaaaccgaagaaaucguagacaguccuaacagaccaggaaacaacuucuuaaugcagguucuaucuuucaucuucaucauggguaaccacgcccgcgaauccgcaguaugggccuuucucagaggccuagguguacaagcaggccgaaaacacguaauaaccugccgcuacuuaucacaaagauacaucgacucacuccgcgugcccgacucagacccaguucaauacgaguucguauggggcccacgagccaggcucgaaaccagcaaaaugaaagcacuuagguacguagcgaggauccacagaaaagaaccucaagacuggccccaacaauaccgagaagcaauggaagaugaagccaaccgcgcugacguaggccaccgacaaaucuucguccauaacuuucgauag

SEQ ID NO: 4326 - RNA, 1572 nt, Artificial Sequence
  AAH93964 variant
augagccucguuucgcaaaacgcccgccacugcuccgccgaaaucacagccgacuacggcgacggccgcggagaaauccaagccaccaacgccucgggcucacccaccuccaugcucguagucgacgcaccccaaugcccacaggccccaaucaacucccaaugcgucaacacaagccaagccgugcaagaccccaacgaccucgaaguccucauagacgaacagucacgacgacuaggggcccuacgaguccaugacccacucgaagaccggucaauagcccucgucaacuucaugagaaugaaaagccaaacagaagguucaauccaacagucagaaaugcucgaauuucuucgagaauacuccgaccaauuccccgaaauauuacgcagagccagcgcccaccuugaucaagucuucggccuaaaccuacgaguaaucgacccucaggccgacaccuacaaccucgucucaaaaagaggauuccaaauaaccgaccgcaucgcagaaucacuugacaugccuaaagccucccuccucgcccucguccucggccacauccuacucaacggcaacagggcccgcgaagccagcaucugggaccuccuacuaaaagucgacaugugggacaaaccccaacgcaucaacaaccucuucgggaacacccgcaaucuucucaccaccgacuucgucugcaugcgauuccucgaguacuggccuguauaugguacuaaccccuuagaguucgaguuccuauggggcagccgggcccaccgcgaaaucaccaaaauggaagcacugaaauucgucucggacgcccacgacgaagaacccuggucauggccagaagaauacaacaaagcacucgaaggcgacaaaaccaaagaacguucacuaacugcaggccucgaguucuggucagaagacacgaugaacgauaaagccaacgaccucguccaacucgcaaucuccgucacagaagaaaugcuacccauacaccaagacgaacuacucgcccacacaggaaaagaguucgaagacgucuuccccaacauccucaaccgcgccacacucauccuagacauguucuacggccucucccucaucgaagucgacacaucagaacacaucuaccuccucguacaacaacccgaauccgaagaggaacaagucaugcucgaaucccucggccgccccacacaagaauacguaaugccaauccucggccucauuuuccucaugggcaaccgcgucaaagaagccaacgucuggaaccuacuccggcgcuucuccgucgacguaggccgaaaacauuccaucaccagaaaacuaaugcgccaaagauaucuagaaugccgcccccucucauacucuaacccagucgaauacgaacugcuuuggggaccacgagcacaccacgaaacaauaaaaaugaaagugcucgaguacauggcacgccucuaccgcaaaagaccccaaaacuggcccgaacaauaucgagaagccgucgaggacgaagaggcacgagccaaaucagaagccaccaucauguucuuccucgaccccaccuaa

SEQ ID NO: 4327 - RNA, 924 nt, Artificial Sequence
  CCDS3269.1 variant
augcugcaaacgccagagagcaggggcuugcccgugccccaggccgagggagagaaagacggcgggcacgacggcgaaacccgggccccgaccgccagccaggaaagacccaaagaagaacucggggccgggcgcgaggaaggggccgcggaaccggcccuaaccagaaaaggggccagggcccuggccgcgaaagcacucgcgcgccggcgcgcguacaggcgccugaacagaacaguggccgagcuaguacaauuccuccuggucaaagacaaaaagaaaagccccaucacgcgaucagaaauggucaaguacguuaucggggaccugaaaauacucuuccccgacaucauagccagggccgcggaacaccucagauacguguucggguuugagcucaagcaauuugacaggaaacaccacacguacauacucauaaacaagcuaaagccccuggaagaggaagaggaagaggaccugggcggggacgggcccaggcucgggcucuuaaugaugauccuaggccugauauacaugagaggcaacagcgcgcgcgaggcccaggucugggaaaugcucaggcgccuaggcguacaacccagcaaguaccacuuccuauucggauacccgaaaaggcucauaauggaggacuuuguccagcaaagauaccuaagcuaccgccggguaccgcauacgaacccgcccgaguacgaguucucgugggggcccaggagcaaccuagaaaucucaaaaauggaaguacucggguucguagccaagcuccacaagaaagaaccgcaacacuggccgguccaguacagagaagcgcucgcggacgaggccgaccgcgcgcgagcgaaagcgcgagcggaagcgagcaugcgcgcaagagcgagugcgcgcgcgggcauacaccugugguag

SEQ ID NO: 4328 - RNA, 660 nt, Artificial Sequence
  AAD31314 variant
augcccaggggcaggaaaucgcgcaggcguaggaacgcgcgcgcggccgaagaaaaucgcaauaacaggaaaauacaagcgagcgaggccucggaaacgcccauggccgcgagcguggucgcgagcacgcccgaggacgaccucucaggcccggaagaggacccgagcacgcccgaggaagcgagcacgaccccggaagaggccucgagcacggcccaggcccagaaaccgagcgugccaaggagcaauuuccagggcacgaaaaagagcuugcucaugagcauacucgcgcuaauauucauaauggggaacucggcaaaggaagcgcuaguauggaaggucuugggaaagcucggaaugcagcccgggcgacagcacucaaucuuuggugauccaaagaaaauagucacggaagaguucguacgccggggauaucuaauauacaagcccgugcccaggagcucgcccguggaauacgaguucuucuggggcccgcgcgcgcacguggaaucgagcaagcuaaaggucaugcacuuugucgcgcgcgugcgcaaucgcugcagcaaggacuggcccugcaacuacgacugggacucggacgaugacgcggaaguggaagcgauacugaacucaggcgcgcgcggguacucagccccguga

SEQ ID NO: 4329 - RNA, 3750 nt, Artificial Sequence
  CCDS73700.1 variant
augagucaacucuccaaaaaccucggcgacagcagcccucccgccgaagcucccaaaccacccgucuacagccgccccaccguucugaugagagcuccucccgccuccucucgcgccccucccguccccugggaucccccgcccaucgaccuacaagccucccuagcagcauggcaagcaccccaacccgccugggaagcgccccaaggccaacuccccgcccccguuguccccaugacacagccacccgcccuaggaggacccauaguccccgccccuccccuggguggccccaugggcaaacccccuacucccggcgucuuaaugguucaucccccaccacccggcgcccccauggcccaacccccaacccccggcguucucaugguacaccccucugcacccggagccccuauggcacacccaccaccuccuggaacccccaugucacacccaccacccccgggcacaccuauggcccacccaccucccccuggaacgccaauggcgcauccacccccucccgggacacccaugguccaucccccucccccaggcacacccauggcucacccaccuccacccggcacaccaauggcccacccaccuccgcccggaacccccauggcgcacccucccccacccggcacucccauggcgcacccacccccuccaggcacacccauggcccaaccacccgcuccaggaguacuuauggcacaaccccucaccccuggaguacuaaugguacaaccagcagcaccuggcgcccccaugguccagccuccacccgccgcaaugaugacccagccgcaaccauccggcgcucccauggcgaaaccacccggacccggaguauuaaugauccacccaccaggugcucgagcacccaugacccaaccacccgccagcggcgcaccaauggcccaaccagccgccccaccagcacaacccauggcgccuccugcacaacccauggcauccugggccccacaagcgcagccacucauacuacaaauacaaucccaggucaucagggccccaccacaaguaccccaaggcccccaagcucccccggcccaacuugccacaccuccgggauggcaagccacuucacccggcuggcaagcaacgcaacaaggcuggcaagcuacaccccucacauggcaaacaacgcaaguuaccuggcaagcgccugcgguuacguggcaagucccacccccgaugcggcaaggaccaccacccauacgacccggacccccucccauccgucccggucccccaccgguacgucaagcaccgccccucauuagacaggccccuccagucauucgccaggccccaccaguaauucgccaagccccacccguaauccgacaagcacccgccguuauccgacaagcucccccaguuauucgccaagccccaccaguuauacgucaagcaccacccgucaucagacaagcaccuccccucauacgacaagccccgccaccuauucgacccgccccucaaguccuagccacccaaccaccccuauggcaagcccuacccccgcccccaccccuaagacaagcaccccaagcccgacuaccugccccacagguccaagccgccccacaagugcccacagccccacccgccacccaaguuccagccgcacccccugccggcccacaaguuccacaaccaguacuccccgcuccacuuucugcaccacucucagcaccccaggccguucacugucccucgaucaucuggcaagcaccuaaaggccagccucccguaccacacgagauacccaccagcauggaguuccaagaagugcaacaaacucaggcacuugccuggcaagcacaaaaagccccgacucacauuuggcaaccacucccugcccaagaagcacaacgucaagcuccuccccuaguucaacuugaacagccauuccaaggcgcaccuccuucucagaaagcugugcaaauccaacucccaccacaacaagcacaggcauccgguccucaggcagaaguucccacccuaccccugcagcccuccuggcaagcaccacccgccguucuacaagcccaacccgggcccccuguggccgcugccaacuuuccccucggcuccgccaaaucacuaaugacaccaagcggcgaaugccgcgccucuagcauugaccgucgaggcaguuccaaagaacgcagaacaucaagcaaagaacgacgggccccuucaaaagaccggaugauuuuugccgcuaccuucugcgcuccaaaagccgucuccgccgcacgcgcucaucugcccgcagcauggaaaaacuuaccugcaacccccgaaaccuucgccccaucaagcuccguauucccagcaacgucucaauuccaacccgcuagccuaaaugccuucaaaggaccuuccgccgccucggaaaccccuaaaucuuugccauacgcguuacaggacccuuucgcaugcguagaagcauuaccagcagucccauggguaccccaacccaacaugaacgccuccaaagcaucacaagccgucccaacauuucuaauggcaacggcugcggccccacaagcaacagcaacuacccaagaagccucaaaaaccuccguagaaccacccagacgcucaggcaaagcaacccgcaagaagaaacaccucgaggcccaagaagacucacgcggucacacacuagccuuccacgacuggcaaggaccaagaccuugggaaaaccucaaccucuccgacugggaaguacaaucccccauacaaguaucuggggacugggaacacccuaauacuccaaggggacuuucuggaugggagggcccuaguacuucuaggauacucagcggaugggagggucccucagccuccugggcacucuccgcaugggaagguccauccacaagccgcgcucuaggacucuccgaaucuccaggauccucacuccccguagucguaucggaaguagccucggucucaccggguucaucagccacccaagacaacuccaaaguagaagcucagccccucucaccacuagacgaacgcgccaacgcauuaguacaauuccuccuaguaaaagaucaggccaaagucccaguacaacguuccgaaauggucaaagucauccuucgcgaauacaaagaugaaugccucgacauaaucaaucgugcaaauaauaaacucgaaugcgccuuuggcuaccaacucaaagaaaucgacacgaaaaaccacgccuacaucaucauaaauaaacucggcuaccacaccggaaaccucgucgcgucauaccuggaccgacccaaauuuggacuccucauggucguacuuucucuaauauucaugaaagguaacugcguaagagaggaccucaucuucaauuuucucuucaaacuugggcuagacguacgcgaaacuaacggacuguuuggaaacaccaagaaacucauuacugaaguauucgucagacaaaaauaccucgaauaucgccgaaucccauacaccgaacccgcagaauacgaguuccucuggggccccagagcguuccuugaaacaucgaaaaugcuuguccuacgauuucuugcaaaacuccacaagaaagauccacaaucuuggccauuccacuaccuugaagcacuggccgaaugugaaugggaggacacagacgaagaugaacccgacacuggagacuccgcccacggccccaccuccagacccccaccccgcuag

SEQ ID NO: 4330 - RNA, 282 nt, Artificial Sequence
  AAC39608 variant
augaaacuccucaugguccucaugcucgccgcccucucccaacacugcuacgccggcuccggcugcccccuccucgaaaacgucaucuccaaaaccaucaacccccaagucuccaaaaccgaauacaaagaacuccuccaagaauucaucgacgacaacgccaccaccaacgccaucgacgaacucaaagaaugcuuccucaaccaaaccgacgaaacccucuccaacgucgaagucuucaugcaacucaucuacgacuccucccucugcgaccucuucuaa

SEQ ID NO: 4331 - RNA, 363 nt, Artificial Sequence
  AAH67220 variant
augaaacuccucaugguccucaugcucgccgcccucucccaacacugcuacgccggcuccggcugcccccuccucgaaaacgucaucuccaaaaccaucaacccccaagucuccaaaaccgaauacaaagaacuccuacaagaauucaucgacgacaacgccaccaccaacgccaucgacgaacucaaagaaugcuuccucaaccaaaccgacgaaacccucuccaacgucgaagucuucauggucaucuccuucuccuccuacaaacucuucaaaucccccgaccaaggccaagucggcuccuccuuccucaccgacaacgccaaagccaccuccgaacaagccuucuccuacaucggcuaa

SEQ ID NO: 4332 - RNA, 357 nt, Artificial Sequence
  AAA19238 variant
augccccgcgaagacgcccacuucaucuacggcuaccccaaaaaaggccacggccacuccuacaccaccgccgaagaagccgccggcaucggcauccucaccgucauccucggcguccuccuccucaucggcugcugguacugccgccgccgcaacggcuaccgcgcccucauggacaaaucccuacacgucggcacccaaugcgcccucacccgccgcugcccccaagaaggcuucgaccaccgcgacuccaaagucucccuacaagaaaaaaacugcgaacccgucguccccaacgccccccccgccuacgaaaaacucuccgcagaacaaucccccccccccuacucccccuaa

SEQ ID NO: 4333 - RNA, 1482 nt, Artificial Sequence
  EAW93427 variant
augcucccacgcugggaacucgcccuauaccugcucgcaucccuaggcuuccacuucuacucauucuacgaaguauacaaagucucccgcgaacacgaagaagaacucgaccaagaguucgaacucgaaaccgacacccucuuuggcggccugaagaaagaugccaccgacuucgaauggucuuucuggauggaauggggcaaacaguggcuagucuggcuccuucucggacacauggucgucucccaaauggcaacccuccucgcacgcaaacaccgccccuggauucucaugcucuacggcaugugggccugcuggugcguacucgguacacccggagucgcaaugguccuccuucacaccaccaucagcuucugcgucgcccaauuccgaucccaacugcuaaccuggcuaugcagcuuacuacuccuguccacccugcgccuccaaggcgucgaagaaguuaaacgccgcugguacaaaaccgaaaaugaauacuaccuucuacaauuuacacuuaccguccgcugccuauacuacaccagcuucucccuggaacuaugcuggcaacaacucccagccgccucaacuagcuacuccuuccccuggaugcucgcauacguauucuacuaccccguccuccacaacggcccaauacucucauucucugaguucaucaaacaaaugcaacaacaagaacacgacucccuuaaagccagccucugcguccucgcccucggacuuggccgccuacucugcuggugguggcucgccgaacuaauggcacaccucauguacaugcacgcuaucuacagcucgaucccccuccuagaaacgguauccugcuggacccugggcggccucgcacucgcgcaaguacucuucuucuacgucaaauaccucguccucuucggcgucccugcccuccucaugcgccucgacggucucacacccccagcccuuccccgaugcgucuccaccauguucuccuucaccggcauguggcgcuacuucgaugucgggcuccauaacuuccucauacgcuacguuuacaucccugucggcggcucacaacacggccuccucgggacccuuuucucgaccgccaugaccuucgccuucguauccuauuggcacggaggguacgacuaccucuggugcugggccgcccucaacuggcucggcgucacggucgaaaacggcgucaggcgacucgucgaaacccccugcauacaagacucccucgcccgguacuucucuccccaagcccgcaggcgcuuucacgccgcccuagccuccugcuccaccuccaugcugauccucuccaaccuaguuuuccuaggcgggaacgaaguaggaaaaacauacuggaaccgaaucuucauccaaggcuggcccugggucacccuuuccguccucggcuuccucuacugcuacucccacgucggcaucgcaugggcccaaacauacgcaaccgacuga

SEQ ID NO: 4334 - RNA, 954 nt, Artificial Sequence
  AAD41349 variant
auggcuguacaaggcucccaacgucgccuccucggcucccucaacucaacccccaccgcaauaccccaacuuggccucgccgccaaccaaaccggcgcccgaugccucgaagucuccaucucagacggucucuuccuuagccucggccucguaucacucgucgaaaacgcccuugucgucgccaccauagccaaaaaccgcaaccuccacucccccauguacugcuucaucugcugccucgcccucuccgaccuccuagucucaggcucaaacguccucgaaaccgccgucauccuccuccucgaagcaggcgcccucgucgcucgagccgcaguccuccaacaacucgacaacgucaucgacgucauaaccugcuccuccaugcucucaucccucugcuuccucggcgccaucgccgucgaccgcuacaucuccaucuucuacgcccuacgcuaccacucaaucguaacacucccccgcgcccgacgcgccgucgccgccaucuggguagccuccguagucuucuccacacuauucaucgcuuacuacgaccacgucgcaguccuccucugucucguagucuuuuuccuagccaugcuuguccucauggccguacucuauguccacaugcuugcccgcgccugccaacacgcgcaaggaauugcucgccuccacaaacggcaacgccccguccaccaaggcuucggccucaaaggcgccgucacccucacaauacuccucggcaucuucuuccucugcuggggccccuucuuccuccaucucacccucaucguccucugccccgaacacccaaccugcggcugcaucuucaaaaacuuuaaccucuuccuagcccucaucauaugcaaugccaucaucgacccccucaucuacgccuuccacucccaagaacuccgacgcacacucaaagaaguccuaaccuguuccugguaa

SEQ ID NO: 4335 - RNA, 954 nt, Artificial Sequence
  AHC09522 variant
auggcaguccaaggcucacaacgucgccuccucggcucccucaacuccaccccaaccgcaaucccccaacucggacucgccgcuaaccaaaccggcgcccgcugccucgaagucuccaucuccgacggccucuuccucucacucggccucguaucucucguagaaaaugcccucgucgucgccacuaucgccaaaaaccgaaaccuccacucccccauguacugcuucauaugcugccuagcccucucagaccuacucguaucuggcuccaacguccuugaaacagccgucauacuacuccucgaagccggcgcccucguagcccgcgccgccguccuccaacaacuagacaacguuaucgauguaauuaccugcucaucaaugcucuccagccuaugcuucuuaggagccaucgccguagaccgcuacaucuccauuuucuacgcccuccgcuaccacuccaucgucacccuaccccgcgcacgccgcgccgucgccgcuaucugggucgccuccgucgucuucucaacccucuucaucgccuacuacgaucacguagccguacuacucugccucgucgucuucuuccucgccaugcucguccucauggccguccuauacguccacaugcucgcacgugccugccaacacgcccaaggcaucgcccgacuacacaagcgccaacgucccguacaccaagguuucggccucaaaggcgccgucacccucaccauccuccucggcaucuucuuccucugcuggggccccuucuuccuccaccucacccucauuguccucugcccagaacacccaacaugcggcugcauauucaaaaacuucaaccucuuccucgcccucaucauaugcaacgccaucaucgacccccucaucuacgccuuccacucccaagaacuccgucgcacccucaaagaaguucuuaccugcucaugguaa

SEQ ID NO: 4336 - RNA, 954 nt, Artificial Sequence
  AHC09804 variant
auggccguucaaggcucccaacgccgccuccucggcucccucaacuccacccccaccgcaaucccccaacucggccucgccgcgaaccaaaccggcgcccgcugccucgaaguauccaucuccgacggccuuuuucuuucacuuggccuagucucccucgucgaaaacgcccucgucguagccaccauugccaaaaaccgcaaccuacacucacccauguacugcuucaucugcugccucgcccucuccgaccuacucgucuccggcuccaacguccucgaaaccgccgucauccuccuccucgaagccggcgcccucgucgcccgcgccgccguccuacaacaacucgacaacgucaucgacgucaucacaugcuccuccaugcuauccucccucugcuuccuaggagccaucgccgucgaccgcuacauauccaucuucuacgcccuccgauaccacuccauagucacccuaccccgagcccgccaagcugucgccgccaucuggguagccuccgucguauucuccacacucuucauagccuacuacgaccacgucgccguccuccucuguuuaguaguauucuuccuagccaugcucguccucauggccguacucuacguccacaugcucgcucgcgccugccaacacgcccaaggcaucgcccgucuccauaaacgccaacgacccguccaccaaggcuucggccuuaaaggcgccgucacccucaccauccuacucggcaucuucuuccucugcuggggccccuucuuccuacaccucacccucaucguccuaugccccgaacacccaaccugcggaugcauauucaaaaacuucaaccucuuccucgcccucaucaucugcaacgccaucaucgacccccucaucuacgccuuccauucccaagaacuucgccgcacccucaaagaaguacuaacaugcucaugguaa

SEQ ID NO: 4337 - RNA, 954 nt, Artificial Sequence
  BAE94313 variant
auggcaguccaaggcucccaacgccgccuacucgguucccucaacuccacccccaccgccaucccccaacucggccuagcagccaaccaaaccggcgcccgaugccuagaagucuccauauccgacggccucuuccuaucccucggccucgucucccucguagaaaacgcccuagucgucgcaaccaucgccaaaaaccgcaaccuccacucccccauguacugcuucauaugcugccucgcccucucugaccuacuugucuccggcucaaacguccucgaaaccgcaguaauccuccuucucgaagccggcgcccuugucgcccgcgcagccguacuccaacaacucgacaacgucaccgacguaauaaccugcuccucuaugcucuccucauuaugcuuccucggagccauagccgucgacagguacaucucaaucuuuuacgcccuccgcuaccacucuaucgucacacucccccgagcccgucgcgccgucgccgcaaucugggucgcauccgucguuuucuccacccucuucaucgccuacuacgaccacguugcaguccuacucugccucguaguuuucuuccuagcuaugcucguccucauggccguccucuacguccacaugcuagcccgugccugccaacacgcccaaggcaucgcccgccuacacaaacgccaacgacccguccaccaaggauucggccucaaaggagccgucacccucaccauccuacucgguaucuucuuccucugcuggggccccuucuuccuacaccucacccucaucguccuaugccccgaacacccaaccugcggcugcaucuucaaaaacuucaaccuauuccuagcccuuauaaucugcaaugccaucaucgacccccucaucuacgccuuucacucccaagaacuccgacgcacccuaaaagaaguacuaaccugcuccugguaa

SEQ ID NO: 4338 - RNA, 954 nt, Artificial Sequence
  AHC09531 variant
auggccguccagggcucccaacgacgacuucucggcucccuaaacuccacccccaccgccaucccucaacugggccucgccgcaaaucaaaccggcgcucgcugccuagaaguuuccaucucagacggccuguuccucucacucggccucgucucacucgucgaaaacgcccucgucgucgcaaccaucgccaaaaaccgcaaccuccacuccccaauguacugcuucaucuguugccucgcccucuccgaccuccucgucucaggcuccaacaugcucgaaaccgccguaauccuccucuuagaagcaggcgcccuaguagcccgcgcagccguucuccaacaacuggauaacgucaucgacgucauuaccugcuccuccaugcucuccucacuuugcuuccucggcgccaucgccguagaccgcuacaucagcaucuucuacgcucuccgauaccacuccaucguuacccuaccccgugcccgccgcgccgucgccgccaucugggucgccuccguagucuucuccacccucuucaucgcauauuacgaccacgucgcaguacuccuaugccuagucgucuucuuccucgcuaugcucguccucauggccguccucuacguccacaugcucgcccgcgccugccaacacgcccaaggaaucgcccgccuccacaaacgccaacgcccuguacaccaaggcuucggacucaaaggcgccgucacccuaaccauacuccucggcauuuucuuccuaugcuggggccccuucuucuuacaucucacccucauaguccuaugccccgaacaccccacaugcggcuguaucuucaaaaacuucaaccucuuccucgcccucaucaucugcaacgccaucaucgacccccucauuuacgccuuccacucccaagaacuccgacgcacacucaaagaaguccuaaccugcuccugguaa

SEQ ID NO: 4339 - RNA, 954 nt, Artificial Sequence
  BAE94311 variant
auggccguucaaggcucccaacgccgucuccucgguucccucaacuccacccccaccgccaucccccaacucggccucgccgcaaaccaaaccggcgcccgcugccucgaagucucaaucucugacggccucuuccucuccuuaggcuuagucucccucguagaaaacgcccucgucguagccaccaucgccaaaaaccaaaaccuccacucacccauguacugcuucauaugcugccucgcccucuccgaccuccucgucuccggcuccaacguucuagaaaccgccgucauccuacuccucgaagccggcgcccuagucgcccgggcugccguccuccaacaacucgacaaugucaucgacgucauaaccugcucauccaugcucuccucucucugcuuccuaggugccaucgccgucgaucgcuacaucuccaucuucuacgcccuccgcuaccacucaauagucacacucccacgcgcccgucaagccgucgccgccaucugggucgccuccgucgucuucuccacucucuucaucgccuacuacgaccacgucgccguccuccucugccuugucgucuucuuccucgcuaugcucguccucauggccguacucuacguccacaugcucgcccgcgcaugccaacacgcccaagguaucgcccgacuacacaaacgccaacgacccguacaccaaggcuucggccuuaaaggcgccgucacccucaccauccuucucggcaucuuuuuccucugcuggggccccuucuuccuccaccuuacccucaucguccucugccccgaacaccccacaugcggcugcaucuucaaaaacuucaaccucuuccuagcccuaaucaucugcaacgccaucaucgacccccucaucuacgccuuccacucccaagaacuccgccgcacccuaaaagaaguccuaacaugcuccugguaa

SEQ ID NO: 4340 - RNA, 954 nt, Artificial Sequence
  BAE94309 variant
auggccguccaaggcucccaacgccgccuccucggcucccucaacuccacccccaccgcuaucccccaacucggccucgccgccaaccaaaccggcgcccgcugccucgaaguauccauauccgacggccucuuucucucccucggccuugucucucuagucgaaaacgcccucgucgucgcaacaaucgccaaaaaccgaaaccuccacucccccauguacugcuucaucugcugccucgcuuuaucagaccuccuagucuccggcucaaacguccucgaaaccgcugucauucuccuccuagaagccggcgcccucgucgcccgcgccgccguucuccaacaacuagacaacgucauugacgucaucacuugcuccucuaugcucucaucccucugcuuccucggcgccauugccguagaccgcuacaucuccauauucuacgcccuccgcuaucacuccaucgucacccucccccgcgcccgacaagcuguaggcgccaucugggucgccucagucgucuucucuacccuuuucaucgccuacuacgaccacgucgccguacuccucugccuaguugucuucuuccuagcgaugcucguccuaauggccguccucuacguccacaugcuagcacgagccugccaacacgcccaaggcauagcccgccuccacaaacgccaacgccccguccaccaaggcuucggucucaaaggcgccguuacccuaaccauacuccuuggcaucuucuuccuaugcuggggccccuucuuccuccaccuaacccucauuguccucugcccagaacaccccacuuguggcugcaucuucaaaaacuucaaccuauuccuagcccucaucaucugcaacgccaucaucgacccccuaaucuaugccuuccacucacaagaacuccgccgaacacucaaagaaguccuaaccuguuccugguaa

SEQ ID NO: 4341 - RNA, 954 nt, Artificial Sequence
  BAE94308 variant
auggcuguccaaggcucccaacgacgucuccuaggcucccucaacuccacccccaccgcaaucccacaacucggccuagccgccaaucaaaccggcgcccgcugccuugaagucuccaucuccgacggccuauuccucucccucggauuagucucccucgucgaaaacgcccucgucguagccaccaucgccaaaaaccguaaccuccacucccccauguacugcuucaucugcugccucgcacucuccgaccuccucgucuccggcucuaacguccuagaaaccgccguaauacuccuacucgaagccggcgcccucgucgcccgcgccgccguucuccagcaacuagacaacgucaccgacgucaucaccuguuccucaaugcuaucaucccuuugcuuccucggugccaucgccguagaccgauacaucuccauauucuacgcccuacgcuaccacucaaucgucacacuaacccgcgcccgccgagccgucgccgcuaucugggucgcaucagucguauucuccacacucuucaucgccuacuacgaccaugucgccguccuccucugccuaguagucuucuuccuagccaugcucguccuaauggccguccuuuacguccacaugcuagcacgcgcuugccaacacgcccaaggcauagcccgacuacacaaacgacaacgaccuguccaccaaggcuucggacucaaaggagcagucacccucaccauccuucucgguaucuucuuccuaugcuggggccccuucuuucuccaccuaaccuuaaucguccucugccccgaacaccccacaugcggaugcaucuucaaaaacuucaaccucuuucuggcccuaauaaucugcaacgccaucauagacccccucaucuacgccuuccacucccaagaacuccgccgaacacucaaagaaguccuuaccugcucaugguga

SEQ ID NO: 4342 - RNA, 954 nt, Artificial Sequence
  BAE94307 variant
auggccguucaaggcucacaacgccgacuccucggcucccucaacuccacccccaccgccaucccccaacucggccucgcagccaaccaaaccggcgcccgcugccucgaagucuccaucuccgacggccucuuccuaucacucggccuagucucccuaguagaaaacgcucucgucguagcaaccauagccaaaaaccgcaaccuacacucccccauguacugcuucaucugcugccuagcucucucagaccuccucgucuccggcuccaacaugcucgaaaccgcagucauacuccugcucgaagccggagcccuaguagcccgcgccgcaguccuccaacaacucgacaacgugaucgacgucauuaccugcucaucaaugcucuccucccucugcuuccuaggcgcaaucgccgucgaccgcuacaucuccauauucuacgcccuccgcuaccacucgauugucauccucccccgcgcccgccgcgccgucgccgccaucugggucgccucagucgucuucucaacccucuucaucgccuacuacgaccacguugccguccuccuaugccuagucguauucuuccucgcaaugcucguccucauggccguccucuacguccacaugcuagcacgcgcaugccaacacgcccaaggcaucgcccgccuccacaaacgccaacgucccguccaccaaggcuucggacucaaaggcgcagucacccucaccauccuccucggaaucuucuuccucugcuggggccccuucuuccuccaccuaacccucaucguacucugccccgaacacccgaccugcggcugcaucuucaaaaacuucaaccucuuccuugcccucauaaucugcaacgccaucaucgauccccuaaucuacgccuuccacucacaagaacuacgacgcacacucaaagaaguacuaaccugcucaugguaa

SEQ ID NO: 4343 - RNA, 951 nt, Artificial Sequence
  BAE94306 variant
auggccguacaaggcucccaacgucgacuccucggcucccucaauuccacccccacugccaucccccaacucggccuugccgccaaccaaacuggcgcccgcugccucgaaguauccaucuccgacggccuauuccucucccucggacucgucucccuagucgaaaacgcccucgucgucgcuaccaucgccaaaaaccguaaccuccacucccccauguacugcuucaucuguugccuagcacucucagaccuucuagucuccggcuccaacguccucgaaaccgccgucauccuucuccucgaagccggcgcccuagucgccagagccgccguccuccaacaacucgacaacgucauugacgucauaaccugcagcucaaugcucuccucccucugcuuccucggcgccaucgccgucgaccguuacaucuccaucuacgcacuccgauaccacuccaucgucacccucccucgagcacgccaagccgucgcugccaucugggucgcauccgucgucuucuccacccuuuucauugccuacuacgaccacgucgccguccuccuaugccucgucgucuucuuccucgccaugcucguccuaauggcaguccuauacguccacaugcucgcccgcgccugccaacacgcccaaggcaucgcccgccuacacaaacgucaacgccccguccaccaaggcuucggccucaaaggcgccgucacccucaccauccuccucggaaucuucuuccucugcuggggcccuuucuuccuucaccuaacccucaucguccucugccccgaacacccaacaugcggcugcaucuucaaaaacuucaaccuuuuccucgcccuaauaaucugcaacgcuaucaucgacccccuuauauacgccuuccacucccaagaacuccgccgcacccucaaagaagucuuaaccugcucaugguaa

SEQ ID NO: 4344 - RNA, 954 nt, Artificial Sequence
  AAQ62977 variant
auggccguacaagguucccaacgccgacuacucggcucacucaacuccacccccaccgccaucccccaacucggacucgcugccaaccaaacuggcgcccgaugccucgaaguauccaucuccgacggucucuuccugucccuuggccucgucucacucgucgaaaacgcccucgucgucgccaccaucgccaaaaaccgcaaccuccacucucccauguacugcuucauauguugccuagcccuuuccgaccuccuugucucuggcuccaacguccucgaaaccgccgucauccuccuccuugaagccggcgcccucgucgcccgcgcugccguccuucaacaacuagacaacgucaucgacgucauaaccugcuccuccaugcucucaucccucugcuuccucggcgccaucgccguagaccgauacaucuccaucuucuacgcccuccguuaccacuccaucgucacccucccacgagcccgccgcgccgucgccgcaaucuggguagccuccgucgucuucuccacccucuucaucgccuacuacgaccacgucgccguacuccucugccucgucgucuucuuccucgccaugcuaguccuuauggcaguccuuuacguccacaugcucgcccgcgccugccagcacgcccaaggaaucgcccgccuccacaaacgacaacgccccguccaccaaggcuucggccuaaaaggcgcggucacccuuaccauccuccucgguaucuucuuccucugcuggggccccuucuuucuccaccucacccucauaauccucugcccagaacauccaaccugcggcugcaucuucaaaaacuucaaccucuuucucgcccucauaaucugcaacgccaucaucgacccccucaucuacgccuuccacucccaagaacuccgccgaacacucaaagaaguccuaaccugcuccugguag

SEQ ID NO: 4345 - RNA, 954 nt, Artificial Sequence
  AAQ62975 variant
auggccguccaaggcucccaacgccgccuccucggaucccucaacuccacccccaccgcaaucccccaacucggacucgccgccaaccaaacuggcgcccgcugccucgaagucuccaucuccgacggccucuuccuuucccucggccuugucucacucgucgaaaacgcccucgucgucgccaccauagccaaaaaucgcaaccuccacucaccaauguacugcuucaucugcugucucgcccucucagaccuccugguauccggcuccaacguccucgaaaccgccgucauucuucuccucgaagccggcgcccucgucgcccgcgcagucguccuccaacaacucgacaacgucaucgacguuauaacaugcuccucaaugcucucuucccuaugcuuccuuggcgccaucgccgucgaccgcuacaucuccaucuucuaugcccuacgauaucacuccaucgucacccuucccagagcacgccgcgccgucgccgccaucuggguagccuccgucgucuucuccacccucuucaucgccuacuacgaccacgucgcaguacuacuuugccuugucgucuucuuccucgccaugcucguccuuauggcaguccucuacguccacaugcucgcccgcgccugccaacacgcacaagguaucgcccgccuccacaaacgccaacgacccguccaccaaggcuucggccucaaaggagccguaacccucacaauccuccuaggcaucuucuuccuuugcuggggcccauucuuccuccaccucacacuaaucguccucugccccgaacacccaaccugcggcuguaucuucaaaaacuucaaccucuuccuagcccucaucauaugcaacgcaauaauagacccccucaucuacgccuuccacucacaagaacuucgccgcacccucaaagaaguccuaaccugcuccugguag

SEQ ID NO: 4346 - RNA, 954 nt, Artificial Sequence
  AAQ62974 variant
auggccguccaagguucacaacgccgccuccucggcucccucaacucaacccccaccgccaucccccaacucggacucgccgccaaccaaaccggcgcccgcugccucgaagucuccaucuccgacggucucuuucucucccucggccuagucucccucgucgaaaaugcccucgucguagccaccaucgccaaaaaccgcaaccuccacuccccaauguacugcuucaucugcugccucgcccucuccgaccuucuagucucaggcuccaauguccuggaaacagccguuauccuacuccucgaagcuggcgcacucgucgcccgcgcagccgucuuacaacaacucgacaaugucaucgacgucaucacaugcuccucuaugcucuccucucucugcuuucucggcgccaucgccgucgaccgcuacaucuccaucuucuacgcccuacgauaccacuccaucgucacccucccccgcgcucgacgcgcaguagccgccauauggguagcauccgucgucuucucaacacucuucaucgccuacuacgaccacgucgccguucuucucugccucgucguauucuuccucgccaugcuugucuuaauggccguccuuuacguccauaugcucgcccgcgccugccaacacgcccaaggcauugcccgccuacacaaacgccaacgccccguccaccaaggauucggccucaaaggcgccguaacacucaccauacuccuuggaaucuucuuccucugcuggggcccauucuuccuccaccucacccucaucguccuaugccccgaacaccccacaugcggcugcaucuucaaaaacuucaaccucuuccucgcccuaaucauaugcaacgccaucaucgaccccuuaaucuacgccuuccacucccaagaacuccgccgaacacucaaagaaguccucacccgcuccugguaa

SEQ ID NO: 4347 - RNA, 954 nt, Artificial Sequence
  AAQ62973 variant
auggcaguccaaggcucccaacgacgccuacucgggucacucaacuccaccccaaccgcuaucccccaacuuggccucgccgcaaaccagacuggcgcccgcugccucgaagucucaauauccgacggccucuuccucucacuaggccucgucucacucgucgaaaacgcccucgucgucgccaccauagccaaaaaccgcaaccuccauucacccauguacugcuucaucugcugccuugcucuuuccgaccuccuagucuccggcucuaacguccuugaaacagcugucauacuccuccucgaagccggcgcucucgucgcccgcgccgccguccuccaacaacuagacaacgucaucgacguaaucacaugcuccuccaugcucuccucauuaugcuuucucggcgccaucgccgucgaccgcuacaucuccaucuucuacgcccuucgauaccauucaaucguaacccucccccgcgcccgacgcgccgucgccgcaaucugggucgccuccgucgucuucuccacccucuuuaucgccuacuacgaccacgucgcaguucuucucugccucgucgucuucuuccucgcaaugcucguccuuauggcaguacucuacguccacaugcuagcccgagccugccaacacgcccaaggcaucgcacgccuccacaaacgccaaagaccuguccaccaaggcuucggccucaaaggcgccgucacgcucaccauccuacucggcauauucuuccucugcuggggccccuucuuccuccaccucacccucaucguccuaugccccgaacacccaaccugcggcugcaucuucaagaacuucaaccucuuccuagcccuaaucaucugcaacgccaucaucgacccucucaucuacgcauuccacucccaagaacuccgccgcaugcucaaagaaguccuaaccugcuccugguaa

SEQ ID NO: 4348 - RNA, 954 nt, Artificial Sequence
  AAQ62972 variant
auggcaguccaaggcucacaacgccgccuacucggcucucuaaacuccaccccaaccgccaucccccaacucggccucgccgccaaccaaaccggcgcccgaugccuagaagucuccauauccgacggccucuuccucucccuaggacucgucucacucgucgaaaacgcccucgucgucgccaccauagccaaaaaccgcaaccuccacucucccauguacugcuucauaugcugccuagcccucuccgaccuucuagucuccggcuccaacguccucgaaaccgcugucauccuccuccuagaagccggggcccuagucgcacgagccgccguccuccaacaacucgauaacgucaucgacgucauaaccugcuccucaaugcucuccucccuaugcuuccucggcgccaucgccgucgaccgcuacaucucaaucuucuaugcccuccgcuaccacuccaucgucacccuuccccgcgcccgacgcgccgucgccgccaucugggucgccucuguagucuucuccacacucuucaucgcauacuacgaccacgucgccguccuccucugccuaguaguauucuuccucgccaugcucguccucauggccguccuauacguccacaugcuagccugggcaugccaacacgcccaaggcaucgcccgccuucacaaacgccaacgacccguccaccaaggcuucggccuaaaaggcgccgucacccuaaccauccuccucggcaucuucuuccucugcuggggacccuucuuccuccaccucacccuaaucguccucugccccgaacaccccacaugcggaugcaucuucaaaaacuucaaccuuuuccucgcccucaucauaugcaaugcaaucaucgacccccucaucuacgcuuuccacucccaagaacuccgccgcacccucaaggaaguacucacaugcuccugguaa

SEQ ID NO: 4349 - RNA, 954 nt, Artificial Sequence
  AAQ62971 variant
auggccguccaaggcucccaaagacgccuccucggaucccucaacuccacccccaccgccaucccccaacucggccucgccgccaaccaaaccggcgcccgcugccuugaagucucgaucuccgacggccucuuccucucacucggacucgucucucuuguagaaaacgcucuagucgucgccaccaucgccaaaaaccgcaaccuccacucccccauguacugcuucaucugcugccuugcacucuccgaccuccuagucuccgguucaaacguacucgaaacugccgucauccuccuccucgaagccggcgcccucguugcccgagccgccguccuccaacaacucgacaacguaaucgacgucauuaccugcuccuccaugcucucaucccuaugcuuccuuggcgccaucgcagucgaccguuacaucuccaucuucuacgcccuccgcuaccacuccaucgucacccuaccccaagcacgccgugcugucgccgccaucuggguagccuccgucguauucucuacccucuucaucgccuacuacgaccacgucgccguucuccucugccucguuguauucuuccucgccaugcucguccucauggcaguccuauacguccacaugcucgcccgugccugccaacacgcccaaggcaucgcucgccuucacaaacgccaacgaccuguacaccaaggcuucggacucaaaggcgcugucacccucaccauccuccucggcaucuucuuccuuugcuggggcccauucuuccuccaccucacccucauaguacuaugucccgaacacccaaccugcggaugcauuuucaaaaacuucaaccucuuucuagcccucaucauaugcaacgccaucaucgacccccuuaucuacgccuuccacucucaagaacuccgccgcacccucaaagaaguccuuaccugcuccugguaa

SEQ ID NO: 4350 - RNA, 954 nt, Artificial Sequence
  AAQ62970 variant
auggccguccaaggcucucaacgccgucuccuuggcucccuaaauucaacccccacagcuaucccacaacuaggccucgccgccaaccaaaccggcgcacgcugccucgaagucuccauauccgacggccuauuccucucccucggccucgucucccuuguagaaaacgcccucgucgucgccaccaucgcuaaaaaccgcaaccuccacucccccauguacuguuucaucugcugccucgcccuccuagaccuacucgucuccggcuccaacguccucgaaacagccgucauccuccuacuagaagccggugcacucgucgcccgcgccgcaguccuccaacaacucgacaacgucaucgacgucauaaccugcuccuccaugcucuccucccuauguuuccucggcgccaucgccgucgaccgcuacaucuccaucuucuacgcccuacgcuaccacuccauuguaacccuacccagagcccgccgugccgucgccgccaucugggucgccuccgucgucuucuccacacucuucauagccuacuacgaccaugucgccguccuccuaugcuuaguagucuucuuccuagccaugcuuguccucauggcaguccucuacguccauaugcucgcccgcgcaugccaacacgcccaaggcauugcacgccuacacaaacgccaacgacccguccaccaaggcuucggccucaaaggagccgucacccuaaccauccuacucggcaucuucuuccucugcuggggcccauucuuccuccaccucacucucaucguccucugcccagagcacccaaccugcggcugcaucuucaagaacuucaaucucuuccuagcccucaucaucugcaacgccauaaucgacccucucaucuacgccuuccacucacaagaacuccgccgcacucucaaagaaguucuaaccugcucaugguaa

SEQ ID NO: 4351 - RNA, 954 nt, Artificial Sequence
  AAQ62969 variant
auggccguccaaggcucccaacgucgccuccucgggucccucaacuccacacccaccgcaauaccccaacucggccucgcugccaaccaaaccggcgcccgaugccucgaagucuccaucuccgacggccuccuccuuucccuaggccuagucucccuaguggaaaacgcccuagucguagcaacuaucgccaaaaaccgcaaccuccacucacccauguacugcuucauuugcugccucgcccuauccgaccuacuugucucaggauccaacguccuggaaaccgccgucauccuccuccucgaagccggcgcccucgucgcacgugccgccguccuccaacaacucgacaacgucaucgacgucauaaccugcucauccaugcucuccucccuaugcuuccucggagccaucgccgucgaccgcuacaucuccauauucuacgcccuccgcuaccacuccaucgucacucuacccagagcccgccgcgcagucgccgcaaucugggucgccuccgucgucuucuccacucucuucauagcuuacuacgaccacgucgccguacuccucugccuaguagucuucuuccucgccaugcucguccucauggccguccuuuacguucacaugcucgcccgcgccugccaacacgcccaaggcaucgcccgccuucacaaacgccaacgcccaguacaccaaggcuucggacucaaaggcgccgucacccucaccauccuccuaggcaucuucuuccucugcuggggccccuucuuccuccaccuuacacucaucguucucugcccggaacacccaaccugcggcugcaucuucaaaaacuuuaaccucuuccucgcccuuaucaucugcaaugccaucaucgacccccucaucuacgccuuccacucccaggaacuucgccguacccucaaagaaguccucacaugcuccugguaa

SEQ ID NO: 4352 - RNA, 954 nt, Artificial Sequence
  AAO21073 variant
auggccguccaaggcucacaacgccgccuccucgguucccuaaacuccaccccaacagccaucccccaacuaggccucgccgccaaccaaaccggagcccgcugccucgaagucuccaucucagacggccuguuccuaucacucggccucgucucccucgucgaaaaugcccuugucgucgcaacaaucgccaaaaaccguaaccuccacuccccaauguacugcuucaucugcugccuagcacuauccgaccuacucgucucaggcuccaacguccgcgaaaccgcagucauccuucuccucgaagcaggagcacucgucgcccgcgccgccguccuacaacaacuugacaacgucaucgacgucaucacaugcuccucaaugcucagcucacuuugcuuccucggcgccaucgccgucgaccgcuacauauccaucuuuuacgcccuccgcuaucacucaaucgucacccuaccccgcgcccgccgcgccguugccgcaaucugggucgccuccgucguuuucucaacccucuucauagccuacuacgaccacgucgccguccuacucugccucguagucuucuuccucgcaaugcuaguccucauggcaguccucuacguccauaugcucgcccgcgccugccaacacgcacaaggcaucgcccgccuucacaaacgccaacgacccguccaccaaggcuucggccucaaaggugccgucacccucaccauccuacuaggcauauucuuccuuugcuggggccccuucuuucuccaucucacccuaaucguccuuugccccgaacaccccacaugcggcugcaucuucaaaaacuucaaccuuuuccucgcccuaaucaucugcaacgccaucaucgacccccucaucuacgcauuucacucccaagaacuccgccgcacucucaaagaaguccuaaccugcucuugguaa

SEQ ID NO: 4353 - RNA, 954 nt, Artificial Sequence
  AHC09567 variant
auggccguccaaggcucccaacgccgccuccucggcagccuaaacucaacccccaccgccauuccccaacucggccuagccgccaaccaaaccggagcccgaugccucgaagucuccaucuccgacggccucuuccucucauuaggucucgucucccucgucgaaaacgcacucguaguagccaccaucgccaaaaaccgcaaccuccacucacccauguacugcuucaucugcugucuugcacuccccgaccuccucgucuccggauccaacguccucgaaaccgccgucauacuccuccucgaagccggcgcacucgucgcccgcgccgccguccuucaacaacuagauaacgucaucgacgucaucacaugcuccucaaugcuauccucacucugcuuccucggcgccauagccgucgaccguuacaucucaaucuucuacgcccucagauaccacuccaucgucacccucccccgcgcccgccgcgccgucgccgccaucugggucgccuccgucgucuucuccacccuuuucauagcauacuacgaccacgucgccguacuccucugccucgucgucuucuuccuugccaugcucguccucauggccgucuuauacguccacaugcucgcccgcgccugccaacacgcacaaggcaucgcccgucuccacaaacgccaacgccccguccaccaaggcuucggccucaaaggagccgucacccucacuauccuccucggcaucuucuuccugugcuggggccccuucuuccuucaccucacccuaauuguccuuugccccgagcaccccacaugcggaugcauauucaaaaacuucaaccuuuuccuagcccucaucaucugcaacgccaucaucgacccccucaucuacgcuuuccacucccaagaacuccgacguacccucaaagaaguccuaaccugcuccugguga

SEQ ID NO: 4354 - RNA, 954 nt, Artificial Sequence
  AHC09812 variant
auggcaguacaaggcucccaaagacgacuccucggcuccuuaaacuccacccccaccgcaauaccccaacucggccucgccgcaaaccaaaccggcgcccgcugccucgaagucuccaucuccgacggccuauuccucucccucggccucgucucucucgucgaaaacgcccuugucgucgccacuaucgccaaaaaccgaaaccuccacucaccaauguacugcuucaucugcugccucgcccucuccgaccuccucgucuccggcucaaacguccucgaaaccgccgucauacuacuacucgaagcaggcgcccuagucgcacgagccgccguccuucaacaacuagauaacguaaucgacgucauaaccugcucaucaaugcucucgucccuauguuuccucggcgccaucgccgucgaccgauacaucagcaucuucuacgcccuccgcuaccacucaaucguaacccuaccucgugcacgccgcgccguagccgccauauggguagccucagucgucuucuccacacucuucaucgccuacuaugaccacguagccguucuacuuugccucauggucuucuuccucgccaugcucguccugauggcaguccuuuacguacacaugcucgcccgcgccugccaacacgcccaaggcaucgcucgacuacacaaacgccaacgccccguccaccaaggcuucggacucaagggcgccgucacccucaccauccuccucggcaucuucuuucucugcuggggccccuucuuccuccaucucacccucaucguccuaugccccgaacacccaaccugcggcugcaucuucaaaaacuucaaccuuuuccucgcacucaucaucugcaacgccaucaucgacccccucaucuacgccuuccacucccaagaacuccgccgcacccuaaaagaaguccuuacaugcucuugguaa

SEQ ID NO: 4355 - RNA, 954 nt, Artificial Sequence
  AHC10192 variant
auggccguccaaggcucccaacgccgacuacuaggcucccucaacuccacccccaccgccaucccccaacucggccucgccgcuaaccaaaccggcgcacgcugccuugaagucucaauauccgacggccucuuccucucccucggccucgucucacucgucgaaaaugcccucgucgucgccaccaucgcgaaaaaccgcaaucuccacucgccaauguauugcuuuaucugcugccuagcauuauccgaccuacucgucuccggcucaaacguccuagaaaccgcagucauccuccuccucgaagccggagcccuugucgcccgagccgccguccuccaacaacucgacaaugucaucgacgucauaaccugcuccucuaugcuuucaucccucugcuuccucggcgccaucgccgucgaccgauacaucuccaucuuuuacgcccuacgcuaccacuccaucgucacccucccccgagcccgccgcgcagucgccgccaucugggucgccucaguagucuucuccacucucuucaucgccuacuacgaccacgucgcaguccuccucugccucgucguauucuuccucgccaugcucguucucauggccguccuauacguacacaugcucgcccgagccugccaacacgcccaaggaacugcccgccuccacaaacgccaacgccccguccaccagggcuuuggccuuaaaggcgcugucacccuaaccauccuccucggcaucuucuuccucugcuggggcccauucuuccuccaccucacccucaucguccuaugccccgaacacccuaccugcggcugcaucuucaaaaacuucaaccucuucuuagcccucaucaucugcaacgccauaaucgacccacucauuuacgcauuccacucccaagaacuccgccgcacccucaaagaaguccuaaccugcuccugguaa

SEQ ID NO: 4356 - RNA, 954 nt, Artificial Sequence
  AHC09641 variant
auggccguccaaggcucccaacgccgccuacuugguucauuaaacuccacaccaaccgccaucccccaacucggccucgccgccaaccaaaccggagcacgaugccucgaagucuccaucuccgacggccucuuccuaucccucggccucgucucccuaguagaaaacgcccucguagucgccaccaucgccaaaaaccgcaaccuccacucccccauguacugcuucaucugcugccucgcacucuccgaccuccucgucuccggcuccaacguccucgaaaccgcagucauccuccuccucgaagccggcgcccucguagcccgcgccgcaguccuccaacaacucgacaacgucaucgacgucauaaccugcuccucaaugcucucaucccucugcuuccuuggcgccaucgccgucgaccgcuacaucuccaucuucuacgcccuccgcuaccacuccaccgucacccucccccgcgcccgccgcgccgucgccgccauaugggucgccuccgucgucuucucaacacucuucaucgcauacuacgaccacgucgccguacuccucugccucgucguuuucuuccucgccaugcucguccuaauggccguccucuacguacacaugcucgcccgcgccugccaacacgcccagggcaucgcacgccuccacaaacgccaacgccccguccaccaaggcuucggacucaaaggcgccgucacccucacaauacuccuaggcaucuucuuccucugcuggggccccuucuuccuacaccuaacacuaaucguacuaugcccugaacacccaaccugcggcugcauauucaaaaacuucaaccucuuccucgcccuuaucaucugcaacgccaucaucgacccccucaucuacgccuuucacucccaagaacuccgccgcacccucaaagaaguccuuaccugcuccugguaa

SEQ ID NO: 4357 - RNA, 954 nt, Artificial Sequence
  AHC10044 variant
auggccguccaaggcucccaaagacgccuacucggcucacuaaacucuacccccaccgccaucccccaacucggccucgccgccaaccaaaccggcgcccgauaccucgaagucuccaucucagacggucucuuccucuccuuaggccucgucucccucgucgagaacgcccucgucgucgccaccaucgccaaaaaccgcaaccuccacucccccauguacugcuucaucugcugccucgcccucuccgaccuccuagucucaggcucaaacguccuagaaaccgccgucauccuacuacucgaagccggcgcccuagucgcccgcgccgccguccuccaacaacucgacaacguaaucgacgucaucaccuguucaucaaugcucuccucccucugcuuccucggcgccaucgccguagaccgauacaucuccaucuucuacgcccuacgcuaccacuccaucgucacccucccccgcgcacgccgcgcaguagccgccaucugggucgccucaguugucuucucaacccuauucaucgccuacuacgaccacguagcuguacuacuuugccucgucgucuucuuccucgccaugcucguucucauggccguccucuacguccacaugcucgcccgugccugccaacacgcccaaggcaucgcccgucuccacaaaagacaacgccccguccaccaaggcuucggccucaaaggcgccgucacccucacuauccuccucggcaucuucuuccuuugcuggggccccuucuuccuacaccuaacccucaucguccucugccccgaacacccaaccugcggaugcauauucaaaaacuucaaccucuuccucgcccucaucaucugcaacgccaucaucgacccccucauauacgccuuccacucccaagaacuccgccguacccucaaagaaguucuaaccugcuccugguga

SEQ ID NO: 4358 - RNA, 954 nt, Artificial Sequence
  AHC09532 variant
auggcaguacaaggcucccaacgccgccuccucggaucccuuaacuccacacccaccgccauaccacaacuaggccuagccgccaaccaaaccggcgcacgcugccucgaaguauccaucucagacggccucuuccucucccucggacucguaucucucgucgaaaaugcccuuguacucgccacuaucgccaaaaaucgcaaccuccacucccccauguauugcuucaucugcugccucgcccucuccgaccuccucgucuccggcucaaacguccucgaaaccgccgucauacuucuccucgaagccggcgcccucgucgcccgcgccgcaguccuccaacaauuagacaacgucaucgacgucauaaccugcuccuccaugcucuccucccucugcuuccucggcgccaucgcugucgaccgcuacauauccauuuucuacgcacuccgauaucacuccaucgucacccucccccgcgcccgccgagccgucgccgccaucugggucgccuccgucgucuucuccacccuuuucaucgccuacuacgaccacgucgccguccuccucugccucgucguuuucuuccucgccaugcucguacucauggccguccuauacguccacaugcucgcacgcgccugccaacacgcccaaggcaucgcccgccuccacaaacgccaacgucccguucaccaaggauucggccuaaaaggcgccgucacccucaccauccuccucggcaucuuuuuccucugcuggggccccuuuuuccuccaccucacacuaauaguccucugccccgaacaccccacaugcggcugcaucuucaaaaacuuuaaccucuuccucgcccucaucaucugcaacgcaaucaucgaccccuuaaucuacgccuuccacucacaagaacuccgacgcacccucaaagaaguacuaaccugcagcugguaa

SEQ ID NO: 4359 - RNA, 954 nt, Artificial Sequence
  AHC11042 variant
auggccguccaaggcucucaacgccgccuccucggcucccucaauuccacccccaccgcaaucccccaacucggccuagcugcaaaccaaaccggagccagaugccucgaagucuccaucuccgacggccucuuccucucucucggccucgucucccucgucgaaaacgcccucguugucgccaccauagccaaaaaccgcaaccuacacucccccauguacugcuucaucugcugccuaccccucuccgaccuacucgucuccggcucuaacguacucgaaacagccgucauacucuuacuugaagccggcgcccucgucgcccgcgccgccguccuccaacaacuggacaacgucauagacgucauaaccugcuccuccaugcuuucaucccuaugcuuccucggcgccaucgccgucgaccgcuacaucagcauauucuacgcccuccgcuaccacuccauagucacacucccccgcgcccgccgcgccgucgccgcuaucugggucgccuccgucgucuucuccacucucuucaucgccuacuacgaccacgucgccguccuccucugccucgucgucuuuuuccucgccaugcucguccucauggccguccucuacguccacaugcucgcucgcgcaugccaacacgcccaaggaaucgcacgcuuacacaaacgccagcgccccguccaccaaggauucggccuaaaaggcgcugucacccucacaauccuucucggaaucuucuuccuaugcuggggccccuucuuccuccaccucacccucauaguccuuugcccugaacaccccacuugcggaugcaucuucaagaacuucaaccucuuccucgcccucaucaucugcaacgcuaucaucgacccccucaucuacgccuuccacucucaagaacuacgccgcacacucaaagaaguccuaaccugcucaugguaa

SEQ ID NO: 4360 - RNA, 954 nt, Artificial Sequence
  AHC10733 variant
auggccguccaaggcucccaaagacgccuccuaggcucccucaauucaacccccaccgccaucccccaacuaggccucgccgcaaaccaaaccggagcccguugccuugaaguaucuaucucagacggacucuuccuaucccuaggccucgucucacuugucgaaaacgcccucguagucgccaccaucgccaaaaaccgcaaccuccacuccccuauguacugcuucauuugcugccuagcacuauccgaccuccucgucucaggcuccaacguucucgaaacagcagucauacuacuccucgaagcuggcgcccucgucgcccgcgcagccguccuccaacaacucgacaacguaaucgacgucaucacaugcucaucaaugcuauccucccucugcuuccucggcgccauagcagucgaccgcuacaucuccaucuucuaugcccuccgcuaccacuccaucgucacucucccccgagcccgccgcgccguagccgccauuugggucgccuccgucgucuucuccacccuauucaucgccuacuacgaccacgucgcaguacuccucugccucgucguauucuuccucgcaaugcugguccucauggccguccucuacguccauaugcucgcccgcgcaugccaacacgcccaaggcauugcccgacuccacaaacgccaacgccccguccaccaaggcuucggccuaaaaggcgccguaacccucaccauccuccucggcaucuucuucuuaugcuggggccccuucuuccuccaccucacccucaucguccucugccccgaacacccaaccugcggcugcaucuucaaaaacuucucccucuuccucgcccucaucaucugcaacgccaucauagacccccucaucuacgcauuucacucccaagaacuccgccgcacacuaaaagaaguccucacaugcuccugguaa

SEQ ID NO: 4361 - RNA, 954 nt, Artificial Sequence
  AHC10696 variant
auggccguccaaggcucccaacgccgucuccucggcucccuaaacuccacccccaccgcuaucccccaacucggccuagccgccaaccaaaccggcgcccgcugccuugaaguguccaucuccgacggccucuuccucucacuaggccucguaucacucgucgaaaacgcccucgucgucgccacaaucgccaaaaaccgcaaccuccacucccccauguacugcuucaucugcugccucgcccucuccgaccuccucgucuccggcagcaacguccuagaaaccgccgucauccuccuccuagaagccggagcccucgucgcccgcgccgcuguacuccaacaacuagacaacgucaucgacgucauaaccugcuccucaaugcuauccucccucugcuuccuaggcgcuaucgccguagacagauacaucucaaucuucuacgcacuccgcuaccacuccaucgucacccuaccccgcgcccgacgcgccgucgccgccauaugggucgccuccgucgucuucucuacccucuucaucgccuauuacgaccacgucgccguccuacucugccucguugucuucuuccuugccaugcucguccucauggccgucuuauacguccacaugcucgcccgcgccugccaacacgcccaaggcauagcccgacuacauaaacgccaacgcccuguccaccaaggcuucggccucaaaggagcaguaacccucaccauccuccucggcaucuucuuccucugcuggggacccuucuuccuccaccucacccucaucguacucugcccagaacacccaaccugcggcugcaucuuuaaaaacuucaaccucuuccucgcacucaucaucugcaacgccaucaucgacccccucauccacgccuuccacucccaagaacuccgccgaacccuuaaagaaguacuaaccugcuccugguag

SEQ ID NO: 4362 - RNA, 954 nt, Artificial Sequence
  AHC09527 variant
auggcuguccaaggcucccaacgccgccuccucggcucccuaaacuccacacccacugccaucccccaacucggccuugccgccaaccaaaccggcgcccgcugccuagaagucucaaucuccgacggccucuuccucucccucggccuaguaucacucguagaaaacgcccucguugucgccacgaucgccaaaaaccgcaaccuccacucccccauguacugcuuuaucugcugccuagcccucucugaccuccucgucuccggaucaaacguccuugaaacagccguaauccuccuccucgaagccggcgcccucguugcccgagcugccguccuacaacaauuagacaaugucaucgacgucauaaccugcuccuccaugcucuccucccucugcuuccucggcgcuaucgccgucgaccgauacauuuccaucuucuacgcccuccgcuaccacuccauaguaacacuaccccgugcccgucgcgcagucgccgccauaugggucgccucaguagucuucuccacccuauucaucgcauacuacgaccacgucgccguccuccucugccucgucgucuucuuccuagccaugcuuguacucauggccguccucuauguccacaugcucgcccgagccugccaacacgcccaaggcaucgcccgccuacacaaacgccaacgcccaguccaucaaggcuucggccucaaaggcgccgucacccuuacaauccuacucggaauauucuuccucugcuggggccccuucuuccuacaccucacccucaucguacuaugccccgaacacccaaccugcggaugcauauucaagaacuuuaaccucuuccucgcccucaucaucugcaacgccaucauccacccccuaaucuacgccuuccacucccaagaacuccgccgaacacucaaagaaguccuaaccugcucuugguaa

SEQ ID NO: 4363 - RNA, 954 nt, Artificial Sequence
  AHC10869 variant
auggccguccaaggcucccaacgccgucuccucggcucccucaauucaacccccaccgccauaccccaacucggccucgccgccaaccaaaccggagcacgaugccucgaagucuccaucuccgacggcuuauuccuuucccucggccucgucucccucguagaaaacgcccucgucgucgccaccaucgccaaaaaccgcaaccuccacuccccaauguacugcuucauaugcugccucgcccuuuccgaccuccucgucucuggcucaaacguccuugaaacagcagucauacuccuucuagaagccggcgcccuagucgcucgcgccgccguccuccaacaacucgauaacgucaucgacguaauuaccugcuccuccaugcucuccagccuaugcuuccucggcgccaucgccgucgacagauacaucuccaucuucuacgcccuccgcuaucacucaaucgucacccugccccgcgcccgcagagccguagccgccaucugggucgccucagucguauucuccacccucuucauagccuacuacgaucacgucgcuguccuccucugccuagucgucuucuuccucgccaugcucguccucauggccguacucuacguccacaugcuagcccgcgccugccaacacgcccaaggcaucgccagacuacacaaacgucaacacccaguccaucaaggcuucggccucaaaggcgcagucacccucaccauccuccucggcaucuucuuccucugcuggggacccuucuuccuccaccucacccucauaguccugugcccagaacacccaaccugcggcuguauauucaaaaacuucaaccuauuccucgcccucaucauuugcaacgcaaucaucgacccccucaucuacgccuuccacucacaagaacuccgaagaacacucaaagaaguccuaaccugcuccugguaa

SEQ ID NO: 4364 - RNA, 954 nt, Artificial Sequence
  AHC11615 variant
auggcuguccaaggcucucaacgacgccuccucggaucucucaacuccacccccaccgccaucccacaacuuggccucgccgccaaccaaaccggcgcccgcugccucgaaguauccaucuccgacggcuuauuccuuucacucggccucgucucccucgucgaaaaugccuuagucgucgccaccaucgccaaaaaccgcaaccuccacucccccauguacugcuucaucugcugccuagcccucuccgaccuccucgucuccggauccaacguccucgaaaccgccgucauccuccuccucgaagccggcgcccucgucgcaagagccgcuguccuacaacaacucgacaacguaaucgacgucauuaccugcuccucaaugcuaucuucacucugcuuccuaggagccaucgccgucgaccgcuacaucucaaucuucuacgcacuccgcuaccacucaaucgucacccuaccccgagcccgccgagccguagccgcaaucugggucgccuccgucgucuuuuccacacucuucaucgccuacuacgaccacguagccguacuucucugccucgucguauucuuccuugccaugcuaguccucauggccguacucuacgugcacaugcuugcccgcgccugccaacacgcccaaggcaucgcccgccuacacaaacgucaacgccccguucaucaaggcuucggccucaaaggcgcagucacccucaccauucuccucggcauauuuuuccucugcuggggcccauucuuccuccaccucacccucauaguccucugccccgagcacccaacuugcggcugcaucuucaaaaacuuuaaccucuucuuaacccuaaucaucugcaacgccaucaucgacccccucauuuacgcuuuccauucccaagaacuccgacgaacccucaaagaaguccuuaccugcuccugguaa

SEQ ID NO: 4365 - RNA, 954 nt, Artificial Sequence
  AHC09535 variant
auggcaguccaaggcucccaacgccgccuucucggaucccucaacucaacccccaccgccaucccccaacuaggccucgccgccaaccagaccggagcccgcugucucgaaguuuccaucuccgacggccucuuccucucccuaggccucgucucccucgucgaaaacgcccuugucgucgccacuaucgccaaaaaccgaaaccuccacucacccauguacugcuucaucugcugccucgcccuauccgaccuccucgucuccggaucuaacguacuagaaaccgccgucauccuccuccuagaggccggugcccucgucgcccgcgccgccguccuccaacaacucgacaacgucaucgacgucauaaccugcuccuccaugcucuccucacuaugcuuccucggagccaucgccgucgaccauuacaucuccaucuucuacgcccuccgcuaccacuccaucgucacccucccacgcgcccgccgcgccgucgcagcaaucugggucgccuccgucguauucucaacccuauucaucgccuacuacgaccacgucgccguacuccucugccuagucgucuucuuccucgccaugcucguccucauggccguccuauacguccacaugcucgcccgcgccugccaacacgcucaaggcaucgcccgccuacacaaacgccaacgcccaguacaccaaggcuucggacucaaaggagccgucacccucacuauccuccuuggcaucuucuuccucugcugggggcccuucuuccuccaccucacucucaucguccucugcccagaacacccaaccugcggcugcaucuucaaaaacuucaaccuauuccucgcccucaucaucugcaacgccaucauagacccccuaaucuacgccuuccacucacaagaacuccgccgaacccucaaagaaguccucacaugcucaugguaa

SEQ ID NO: 4366 - RNA, 954 nt, Artificial Sequence
  AHC11840 variant
auggcaguccaaggcucccaacgacgccuccucggcucccucaacuccacccccaccgccaucccccaacucggccuagcugccaaucaaaccggcgcccgaugccucgaagucucuaucucagacggccuauuucucucccuaggucuagucucccucgucgaaaacgcccucgucguagcaaccaucgccaaaaaccgcaaccuccacucccccauguacugcuucaucugcugccucgcccucuccgaccuccucgucuccggcuccaacguccucgaaaccgcagucauccuccuacucgaagccggcgcccuagucgcacgcgccgccguccuacaacaacucgacaacguaaucgacguuauaaccugcuccuccaugcucucaucucucugcuuccucggcgccaucgcagucgaccgcuacaucuccaucuucuacgcccuccgcuaccacuccaucguaacacuaccccgcgcacgacgagccguagccgccaucugggucgccuccgucgucuucuccacacucuucaucgccuacuaugaccacgucgccguccuccuaugccucgucguauucuuccuugcaaugcuuguccuaauggccguccucuacguacacaugcucgcccgcgccugucagcacgcccaaggaaucgcccgccuccacaaacgccaacgcccaguccaucaaggcuucggccucaaaggcgccgucacccuuaccauccuccucggaaucuucuuccucugcuggggcccauucuuccuccaccucacucucaucguccuaugccccgaacacccgaccugcggcugcaucuucaaaaacuucaaccuauuccucgcccucaucaucugcaacgcuauaaucgacccccucaucuacgccuuccacaaccaagaacuccgccgcacccucaaagaaguccucacaugcucuugguaa

SEQ ID NO: 4367 - RNA, 954 nt, Artificial Sequence
  AHC09665 variant
auggccguccaaggcucccaacgacgccuacucggcucucuaaacuccacccccaccgccaucccccaacuaggucucgcagccaaccaaaccggcgcacgaugccuagaagucucaaucuccgacggccuauuccucucccucggccuagucucucuagucgaaaacgcccuugucgucgccaccaucgccaaaaaccgcaaccuccacucacccauguacugcuucauaugcugccucgcccucuccgaccuccuugucucaggcuccaacguacuugaaaccgccgucauccuacuacuagaagccggagcccucgucgcccgcgcagccguacuccaacaacuagauaacgucauagacaugaucacaugcuccagcaugcucuccucccucugcuuccuuggcgccaucgccgucgaccguuacaucucuaucuucuacgcccuccgauaccacuccaucgucacacucccccgugcccgucgagccguagccgccaucugggucgccucagucgucuucuccacccucuucauagccuacuacgaccacgucgccguccuccucugccucgucgucuucuuccuagccaugcucguacucauggccguccucuacguccacaugcucgcccgcgccugccaacacgcccaaggcaucgcccgccuccacaaacgccaacgccccguccaccaaggauucggccuaaaaggcgccguaacccuuaccauccuacucggcauauucuuccucugcuggggccccuucuuccuccaccuuacccucauaguacucugccccgaacacccaaccugcggcugcaucuucaaaaacuucaaccuauuccuagcccucaucaucugcaacgccaucaucgacccccucaucuacgccuuccacucccaagaacuccgccgcacccucaaagaaguccucacaugcucaugguaa

SEQ ID NO: 4368 - RNA, 954 nt, Artificial Sequence
  AHC11324 variant
auggcuguccaaggcucccaacgccgccuccucggaucccucaacuccacccccaccgccaucccccaacuaggccucgccgccaaccaaaccggcgcccgcugccucgaagucucaaucucagacggccucuuucucucccucggucucguaucccucgucgaaaacgcccucgucgucgcuaccaucgccaaaaaccgaaaucuccacucccccauguacugcuucaucugcugccucgcccucucagaccuccuagucuccggcucaaacguccucgagacugccgucauccuacuucucgaagccggugcccucgucgcacgagccgccguucuccaacaacucgacaacgucauagacgucauaaccugcucaucaaugcuauccucucuaugcuuccucggcgccaucgccguugaccgcuacaucuccaucuucuacgcacuacgcuaccacuccaucgucacacuaccccgcgcacgucgcgccgucgccgccaucugggucgccucagucgucuucuccacccuauucaucgccuacuacgaccacgucgccguccuacuaugccucguagucuucuucuuagcaaugcuuguccucauggccguccuauacguccacaugcuagcccgagccugccaacacgcccaaggcaucgcacgccuccacaaacgccaacgacccguccaccagggcuucggccuaaaaggcgcagucacccuaaccauacuacucggcaucuucuuccucugcuggggacccuucuuccuccaccucacccucauaguccuaugccccgaacauccuaccugcggcugcauuuucaaaaacuucaaccucuuccuagcccucauaauccgcaacgccaucaucgacccccuaaucuacgccuuccacucccaagaacuccgacgcacccucaaagaaguccucacaugcucuugguaa

SEQ ID NO: 4369 - RNA, 954 nt, Artificial Sequence
  AHC09521 variant
auggccguccaaggcucccaacgccgccuacucggaucccuaaacuccacccccaccgccaucccccaacuaggccuagccgcaaaccaaaccggcgcccgcugccucgaagucuccauuuccgacggccucuuccuuucccucggccucgucucccuagucgaaaaugcccuaguagucgccaccauagccaaaaaccgcaaccuccacucccccauguacugcuucauaugcugccucgcccucuccgaccuccuugucuccggcuccaacguccucgaaaccgccgucauccuccuccucgaagccggcgcccuaguggcccgagccgccguccuccaacaacuggacaacgucaucgacguuauaaccugcuccuccaugcuauccucccuaugcuuccucggcgccaucgcagucgaccgcuacaucuccaucuucuacgcccuccgauaccacuccaucgucacccuaccaugggcccgccgagccgucgccgccaucuggguugccuccguagucuucuccacccucuucaucgccuacuacgaucacguagccguccuccucugccuaguagucuucuuccucgcuaugcucguccucauggccguccucuacguacacaugcuagcccgcgcaugucaacacgcccaaggcaucgcccgccuacacaaacgacaacgccccguacaccaaggcuucggccucaaaggcgccgucacccucaccauccuucucggcaucuuuuuccucugcuggggacccuucuuccuccaccucacccucaucguccuaugccccgaacacccaacaugcggcugcaucuucaaaaacuucaaccucuuccucgccuuaaucaucugcaacgccaucaucgacccccucaucuacgccuuccacucacaagaacuccgccgaacccuuaaagaaguacuuacaugcucaugguga

SEQ ID NO: 4370 - RNA, 954 nt, Artificial Sequence
  AHC11794 variant
auggcaguccaaggcucccaacgccgccuccuuggcucccucaacucaaccccaaccgcuauuccucaacucggccuugccgcaaaucaaaccggugcccgcugccucgaaguauccaucuccgacggccucuuccuuucccuuggccucgucucacucgucgaaaacgcacucgucgucgccaccauugccaaaaaucgcaaccuccacucccccauguacugcuucaucugcugccucgcccucuccgaccuucucgucuccggcuccaacguccucgaaaccgccgucauccuccuacucgaagccggcgcccuaguagcccgcgccgccguccuccaacaacuagacaacgucauagacguaauaaccugcuccuccaugcucuccucacucugcuuucucggcgccaucgccgucgaccgcuacaucuccaucuucuacgcccugcgauaccacuccaucgucacccucccccgcgcccgccgcgccgucgccgcuaucuggguagccuccgucguauucuccacccuauucaucgccuacuacgaccacgucgccguccuccucugccuagucguauucuuccucgcgaugcucguccucauggccguccucuacguacauaugcucgcccgcgcaugccaacacgcccaaggaaucgcccgucuccacaaacgccaacgccccguccaucaaggcuucggccuaaaaggcgccgucacccuaaccauccuccuuggcaucuucuuccucugcuggggcccauucuuccuccaccucacccucaucguccuuugccccgaacaccccgaaugcggcugcauauucaaaaacuucaaucucuuccuagcacucaucauuugcaacgccauuaucgacccccuaaucuacgccuuccacucccaagaacuacgccgaacccucaaagaaguccuaaccugcuccugguaa

SEQ ID NO: 4371 - RNA, 954 nt, Artificial Sequence
  AHC10874 variant
auggccguccaaggcucccagcgacgccuccucggcucacuaaacuccacccccaccgccauaccccaacucggccucgcugccaaccaaaccggcgcccgcugccucgaagucucaaucucagacggccucuuccucucacucggccuugucucccucgucgaaaacgcccucgucguagccacgaucgccaaaaaccgcaaccuacacucccccauguacugcuucaucugcugccucgcucucuccgaacuacuuguauccggcucuaacguacucgaaacagccgucauucuucuacuagaagccggugcacucgucgcccgcgccgccguccuccaacaacuagauaacgucaucgacgucaucacaugcuccuccaugcucuccucccuuugcuuccucggcgccaucgccgucgaccgcuacauaucuaucuucuacgcccuccgauaccacucuaucgucaccuuaccccgcgcucgccgcgcagucgcugccaucugggucgccucugucgucuucucaacccucuucaucgccuacuacgaccacguugccguccuucucugccucgucgucuucuuccucgccaugcuaguccuaauggccguucuauacguccacaugcuugcccgcgccugccaacacgcccaaggcaucgcccgccuccacaaaagacaacgccccguccaccaaggcuucggccucaaaggcgcagucacccucaccauccuacucggcaucuucuuccucugcuggggucccuucuuccuccaccucacucucaucguacuuugucccgaacacccuaccugcgguugcaucuucaaaaacuucaaccucuuccucgcccucaucauuugcaacgccaucaucgacccccucauauacgccuuccacucccaagaacuccgccgcacacucaaagaaguccuaaccugcagcugguag

SEQ ID NO: 4372 - RNA, 954 nt, Artificial Sequence
  AHC09597 variant
auggccguccaaggcucccaacgccgccuacuaggcucccucaacuccaccccaaccgccaucccccaacuuggccucgccgccaaccaaaccggcgcccgcugccucgaagucuccaucuccgauggcuuauuccucucccucggccuagucucccucgucgaaaacgcccuuguagucgcuaccaucgccaaaaaccgaaaccuccacucccccauguacugcuucaucugcugccucgcacuauccgaucuucuagucuccggcucaaacguccucgaaaccgccgucauucuccuccuggaagccggcgcccucgucgcccgcgccgccguccuccaacaacucgacaacgucaucgacguaauaaccugcucaucaaugcucuccucccuaugcuuccucggcgccaucgccguugaccgauacaucuccaucuucuacgcccucugcuaccacuccaucgucacccuuccccgugcccgcagagccgucgccgccaucuggguugccuccgucguauucuccacccucuucauugccuacuacgaccacgucgccguccuccucugccucguaguauuuuuccuagccaugcuaguccucauggccguccucuacguccauaugcuagcccgcgcaugccaacacgcccaaggcaucgcccgccuccacaaacgccaacgccccguccaucaagguuucggccuaaaaggcgccguuacccucaccauccuacucggaauauucuuccucugcuggggccccuuuuuccuccaccucacccucauuguccucugccccgaacacccaaccugcggaugcaucuucaaaaacuucaaccucuuccucgcucuaaucaucuguaacgccaucaucgacccacuaaucuaugccuuccacucccaagaacuccgccgcacccucaaagaaguccucacaugcucaugguaa

SEQ ID NO: 4373 - RNA, 1665 nt, Artificial Sequence
  CCDS816.1 variant
augaccgcucccggagccgccggccgcugcccaccgacaaccuggcucggcucacuacuccuccucgucugccuacuugccagccgcucaaucaccgaagaagucuccgaauacugcucccacaugaucggcuccggccaccuccaaucccuccaaagacucaucgacagccaaauggaaacauccugccaaauaacuuucgaguucguagaccaagaacaacucaaagaccccgucugcuaccuaaagaaagcauuccuccuaguacaagacauaauggaagacacgaugcgcuuccgagacaacacacccaacgcaauagcaaucguccaacuacaagaacucucacuccgacucaaaagcugcuucacaaaagacuacgaagaacacgauaaagccugcguccgcaccuucuaugaaacuccccuacaacuccucgaaaaagucaaaaacgucuucaacgaaaccaaaaaccuauuggacaaagacuggaacaucuucucuaaaaacugcaacaacucauucgcagaaugcuccucacaagacgucgucaccaaacccgauugcaacugcuuauaccccaaagcgaucccaagcuccgaccccgcauccgucucaccucaccaaccacucgcaccauccauggccccaguagccggccucaccugggaagacuccgaagguaccgaaggaucaucccuccuaccuggcgagcaaccccuucacaccgucgacccuggaagcgccaaacaacggccaccccgcucaaccugccaaucuuucgagccacccgaaacacccgucguaaaagacucgaccaucggcgguucaccccaaccccgacccagcguaggcgcuuucaaccccggcauggaagacauccuagauuccgccaugggcacaaacuggguccccgaggaggccagcggcgaagcaagcgagauaccuguaccccaaggaacagaacucucccccucacgaccaggcgggggcuccaugcagacugaacccgcacgccccucaaacuuccucuccgccuccucgccccuacccgcaucagcaaaaggccaacaaccagccgacguaacaggcacagcacuaccacgcgucggaccaguccgcccuaccggccaagacuggaaccacaccccacagaaaacugaccaccccuccgcccuccuacgcgaucccccggaaccaggcagcccccgaauuuccucccuccgcccccaaggucucaguaaccccucuacccucucugcacaaccccaacucucccgcucacacuccuccggcagcguacuuccccuuggcgaacucgaaggccgacgcagcacucgcgacagacgcuccccugccgaacccgaagguggcccagcuuccgaaggcgccgcccgaccccucccccgcuucaacuccgucccccucaccgacaccggccacgagcgccaauccgaaggcuccuucaguccccaacuccaagaaagcguauuccaccuccucgucccauccgucauccucguucugcuagcagucgguggccuacucuucuaucgcuggcguagacgcucacaucaagaaccccaacgagcugacucaccacucgaacaaccagagggcuccccacucacccaagacgaccgacaagucgaacuccccgucuaa

SEQ ID NO: 4374 - RNA, 1893 nt, Artificial Sequence
  EAW85719 variant
auggcacuaccuacagcccgcccucuacucggaucaugcggcacuccugcccucggaucccuccucuuccugcucuuuucccucggauggguccaacccucucgcacucuagccggcgaaacaggccaagaagcagcaccccuagacggugucuuggccaacccacccaacaucuccucccuauccccacgacaacugcuagguuuccccugcgccgagguaagcggccucucaacugaaagaguacgcgaacucgccgucgcucucgcgcagaaaaacguuaaacuaagcaccgaacaacucagaugccucgcccaccgccucucugaaccacccgaagaccuggaugcccuuccccucgaccuccuccuuuuccucaaccccgacgcauucuccggaccccaagccuguacccgcuuuuucucacgcauaacaaaagcaaacgucgaccuccuaccacguggagccccagaacgccaacgccuccuuccagcagcccucgccugcuggggaguaagagguucacuacucucugaagccgacguucgugcccucggcggacuagcaugcgaccuucccggucgcuucgucgccgaauccgccgaaguacuacuuccccgccuaguauccugccccgguccacuagaccaagaccaacaagaagcagccagagcugcccuccaaggaggcggaccacccuauggaccucccuccaccugguccgucuccacaauggacgcccuucgcggacuccuccccguacucggccaacccaucauccgcuccauaccccaaggaauaguugccgccuggcggcaacgcagcucacgcgaccccuccuggagacaacccgaacgcacaauacuccgccccagauuccgccgcgaagucgagaaaacagccugucccuccggcaagaaagcccgcgaaauagacgaaucacucaucuucuacaagaaaugggaacuagaagcaugcguggaugccgcucuacucgccacccaaauggaccgcgucaacgcaauccccuucacauacgaacaacucgacguccucaaacacaaacuagacgaacucuacccccaaggcuaucccgaguccgucauccaacaccucggcuaccucuucuuaaaaaugucccccgaagacauccguaaauggaacguaacaagucucgaaacccucaaagcucuccucgagguaaacaaaggccacgaaaugagcccccaagcaccccgacgcccccucccucaagucgccacucucaucgacagauuuguaaaaggccgaggccaacucgauaaagacacccuagacacccuaaccgcuuucuacccuggcuaucucugcucccugucacccgaagaacucuccucuguaccacccuccagcaucugggcuguuagaccccaagaucucgacacaugcgaccccagacaacucgauguccucuaccccaaagcacgccucgccuuucaaaacaugaacggcucagaauacuucguaaaaauccaauccuuucucggcggagcccccaccgaagaccucaaagcacuaagccaacaaaacguaucaauggaccucgccacguuuaugaaacuccgaacagacgcaguacucccccucaccguugccgaaguccaaaaacuacuuggcccccacguggaaggccuaaaagccgaagaacgacaccgacccguacgagacuggauucuccgucagcgacaagacgaccucgacacucuaggccucggacuccaaggcgguauuccaaacgguuaucucguacuugaccucuccaugcaagaagcccucucuggcacccccugccuucucggccccgggccaguccucaccguccucgcccuccuguuagccagcacccucgcuuaa

SEQ ID NO: 4375 - RNA, 1515 nt, Artificial Sequence
  CCDS46865.1 variant
auggaagcacuccgcguccaaauguucaugcccugcuccuucgaaucccuauaccuaucauccgcugaacaccccggcgccucaaaaccucccaucagcagcuccucaaugaccucucgcauacuccuccgacaacaacucaugagagaacaaaugcaagaacaagaacgccgcgaacaacagcaaaaacuccaagccgcacaguucaugcaacaacggguaccagucagccaaacacccgcaauaaacgucuccguaccaaccacacuccccuccgccacccaaguccccauggaaguccucaaaguacaaacacaccucgaaaaucccaccaaauaccacauacaacaagcccaacgacaacaagucaaacaauaccucuccaccacacucgcaaacaaacacgccaaccaaguccuaucccuacccugccccaaccaacccggagaccacguaaugcccccaguccccgguuccucagccccgaacuccccaauggccaugcucacuuuaaacaguaacugcgaaaaagaaggauucuacaaauucgaggaacaaaaccgcgcagagucugaaugcccagguaugaacacacacucacgagcauccugcaugcaaauggaugacguaaucgacgacaucauaucccucgaauccuccuacaacgaagaaauccucggccucauggaccccgcccuccaaauggcaaacacacugcccguuagcggcaaccucaucgaccucuacggcaaccagggccuacccccgcccggacucaccaucuccaacucaugcccagcaaaccucccaaacaucaaacgcgaacucaccgaauccgaagcccgcgcccuagcaaaagaacgacaaaagaaagacaaccacaaccucaucgagagacgacgacgcuucaacaucaacgaccguaucaaagaacuaggcacacuaauccccaaaagcaacgaccccgacaugcgcuggaacaaaggcaccauucucaaagccagcguagacuacauccgcaaacuacaacgagaacaacaacgcgcaaaagaacuugaaaacagacaaaagaaacucgagcacgccaaccgccaccuccuccugcggauacaagaacucgaaaugcaagcccgcgcccacggccucucccuaauaccuucaacgggccugugcuccccagaccuagucaaccgcaucaucaaacaggaacccguacuagaaaacugcucccaagaccuccuucaacaccacgcugaccuaacaugcaccaccacccucgaccuaacagacggaacaaucacuuucaauaacaaccucggcacgggcaccgaggccaaccaagcauacagcguacccaccaaaaugggaaguaaacucgaagacauccucauggacgacacccucucccccguaggaguuacagacccacuccucucauccgucucccccggcgcaucaaaaaccuccucccgccgcagcuccauguccauggaagaaaccgaacacacaugcuaa

SEQ ID NO: 4376 - RNA, 1260 nt, Artificial Sequence
  CCDS2913.1 variant
augcuagaaaugcucgaauacaaccacuaucaaguccaaacccaccuagagaaucccaccaaauaucacauacaacaggcacaacgccaacaagucaaacaauaccuauccaccacccucgccaacaaacacgccaaccaagugcucucuuuaccuugccccaaccaacccggggaccacgucaugcccccuguaccaggaagcagcgcucccaacuccccaauggccaugcuaacacuuaacucaaacugcgaaaaagaaggcuucuacaaauucgaggaacaaaaccgcgcagaaucggaaugccccggcaugaacacccacucccgcgcaucuugcaugcaaauggacgacgucauagacgacauaauuucacucgaauccuccuacaacgaagaaauccucggccuaauggacccagcacuccaaauggccaacacccuccccguaagcggaaaccucaucgaccucuacgguaaccaaggccuuccuccacccggccucacaaucuccaacuccugcccagccaaccuacccaacaucaaacgcgaacucaccgcaugcaucuuccccaccgaauccgaagcacgagcacucgccaaagagcgacaaaagaaagacaaccacaaccuaaucgaacgacgacgccgcuucaacaucaacgaccgcaucaaagaacucggaacccucauccccaaauccaacgacccagacaugcgcuggaacaaaggcacaauccucaaagccuccgucgacuacauccgcaaacuucaacgcgaacaacaacgagcuaaagaacucgagaacagacaaaagaaacucgaacacgccaaccgccaccuccuccucagaauccaagaacucgaaaugcaagcccgcgcacacggccucucacuaaucccaagcacaggccucugcuccccagaccucguaaaccgaaucaucaaacaagaaccaguccuagaaaauugcucccaagaccuacuccaacaccacgccgaccuaaccugcaccacaacccuagaucucacagauggcaccauaaccuucaacaacaaccucggaaccggcacagaagccaaccaagccuacuccguacccaccaaaaugggaucgaaacucgaagacauccuaauggacgacacccucucaccagucggcgucacugacccacuccuaucauccgucucccccggcgccucaaaaaccuccucgcgccgcuccuccauguccauggaagaaaccgagcacacaugcuaa

SEQ ID NO: 4377 - RNA, 1581 nt, Artificial Sequence
  XM_005264754 variant
augcaauccgaaucgggcauaguccccgacuucgaaguuggagaagaguuccacgaagaaccaaaaaccuacuaugaacucaaaucccaaccccucaaauccagcagcucagccgaacacccgggggcaucaaaaccgcccaucucauccucaucaaugaccuccagaauacuacucagacaacaacucaugcgcgaacaaaugcaagaacaagaacgccgcgaacaacaacaaaaacuccaggccgcccaauucaugcaacaacgcguccccgucucccaaacccccgcaaucaacgucuccguccccacaacccuacccucugccacccaaguccccauggaaguacucaaaguccaaacccaccuugaaaaucccaccaaauaucacauccaacaagcacaacgccaacaagucaaacaguaccucagcacaacucucgccaacaaacacgccaaccagguacucucucuccccugccccaaccaacccggugaccacguaaugccaccgguccccggcuccucagccccaaacagccccauggccaugcucacccucaacucaaacugcgaaaaagaaggauucuacaaauucgaagaacaaaaccgggccgaaucugaaugcccaggaaugaacacccacucccgagcaucuugcaugcaaauggacgacgucaucgacgacaucaucagccucgaaagcuccuacaacgaagaaauccucgggcuuauggacccagcccuccaaauggcaaacacccuccccguaucgggaaaccuaauagaccucuacggcaaccagggacucccaccacccggccuaacaauuucuaauagcugccccgcaaaccuccccaacaucaaaagagaauuaaccgcaugcaucuuccccacagaaucugaggcccgugcacuagccaaagaacgccaaaagaaagacaaccauaaucuaauugaacgucgccgccgcuucaacaucaacgaccguaucaaagagcucggcacccucauucccaaauccaacgaccccgacaugcgauggaacaaaggcaccauacuaaaagccuccgucgacuacauccgcaaacuacaacgcgaacaacaacgcgcuaaggaacucgaaaaucgccaaaagaaacucgaacacgccaaccgccaccuucuccuaagaauccaagaacucgaaaugcaagccagagcccacggccucucacuaauacccuccaccggucucugcucccccgaccuaguaaaccgaaucauuaaacaagaacccguccucgaaaacugcucccaggaccuacuccaacaccacgcagaccuuaccugcacuacaacccuagaccucaccgacgguaccaucacauucaacaacaaccucggaacgggaaccgaagccaaccaagccuacucagucccaacaaaaaugggcucgaagcucgaagacauccucauggacgacacacuaucccccguaggagucaccgacccccuucucucauccgucucacccggcgccucaaagaccuccucccgccgauccuccauguccauggaagaaaccgaacacacuugcuaa

SEQ ID NO: 4378 - RNA, 1065 nt, Artificial Sequence
  BAG52140 variant
auggcccccgccgccuggcuccgcuccgccgccgccagagcccuccuaccacccaugcuccuccugcuccuacaacccccaccccuccucgcccgcgcccucccacccgacguccaccaccuacacgcagaacgacgcggcccccaaccauggcacgccgcccuaccauccucacccgcccccgcacccgccacccaagaagcaccccgccccgccuccucacuccgcccaccccgcugcggcguacccgaccccuccgacggccuauccgcccgcaaccgccaaaaacgcauccuccgauuccccuggcaacucguccaagaacaagucagacaaaccauggccgaagcacucaaagucugguccgacguaacgccccuaaccuucacugaaguccacgaaggcagagcagacaucaugauagacuucgcccgcuacuggcacggcgacgaccuccccuucgacggcccgggaggcauccucgcccacgcauucuuccccaaaacccaccgagaaggcgacguccacuucgacuacgacgaaaccuggaccaucggagacgaucaaggcaccgaccuccuccaaguugccgcccacgaauuuggacacguacucggccuacaacacaccaccgccgccaaagcccucauguccgccuucuacacauuccgauacccacucucacucucacccgacgacugccgcggcguacaacaccucuacggacaacccuggccaaccguaaccucucgcacccccgcccucggcccacaagcagguaucgacacuaacgaaaucgccccacucgaacccgacgcaccacccgacgccugcgaagccagcuucgacgccgucuccaccauacgcggagaacucuucuucuuuaaagccggauucguauggcgacuuagaggcggccaacuccaacccggcuaccccgcccucgcaucccgucacuggcaaggacucccauccccagucgaugccgccuucgaagacgcccaaggacacauaugguucuuccaaggcacaaccggcgucuccaccccagcacccggaguauaa

SEQ ID NO: 4379 - RNA, 804 nt, Artificial Sequence
  AAV40839 variant
augcgccuaaccguacucugcgccgucugucuacuccccggcucccuugcccuaccacucccccaagaagccggaggcauguccgaacuccaaugggaacaagcccaagacuaccucaaacgcuucuaccucuacgacucagaaaccaaaaacgccaacucccucgaagcaaaacucaaagaaaugcaaaaauucuucggccuccccaucaccggaaugcucaacucccgcgucaucgaaaucaugcaaaaaccccguugcggcguccccgacgucgccgaauacucccucuuccccaacucacccaaauggacauccaaagucgucaccuaccgaaucgucagcuacacccgcgaccucccacacaucaccguagaccgccuagucagcaaagcacuaaacauguggggcaaagaaaucccccuacacuuccgaaaagucguuuggggcaccgccgacaucaugauuggauucgcccgcggcgcccacggcgacuccuaccccuucgacggccccggaaacacccucgcccacgcauucgcccccggcaccggccucggcggcgacgcccacuucgacgaagacgaacgauggacagacggcuccucccucggcaucaacuuccuauacgccgccacccacgaacucggccacucccucggcaugggccacuccuccgacccaaacgccgucauguaccccaccuacggcaacggcgacccacaaaacuucaaacuaucccaagacgacaucaaaggcauccaaaaacuguacggcaaacgcuccaacucccgcaagaaauaa

SEQ ID NO: 4380 - RNA, 3768 nt, Artificial Sequence
  J05582.1 variant
augacaccuggcacccaaucacccuucuuucuucuacuacuucugacaguacuaacaguuguuacagguaguggucacgccucaagcaccccuggcggagaaaaagagacaucagcaacacaacgaucuuccguaccaucuucaacagagaaaaacgcagucucuaugacaucuucaguuuuauccucucacucaccuggcuccggcucauccacuacucaaggccaagacguuacacucgcacccgccaccgagccagcuagcggauccgcagccacguggggucaggauguaaccucaguccccguaacgagaccagcccucggaucaacaacacccccggcucaugacguaacuucagcacccgacaacaaaccagccccaggcucaaccgccccacccgcacauggcgucaccagcgcucccgauaccagaccugccccaggaucgacugcucccccugcacacggaguuaccucagccccagacacuagacccgcacccggaucaaccgccccuccugcccauggcgucaccuccgcacccgacacucgacccgcaccaggcucuaccgcaccacccgcucacggaguuaccuccgccccagacacacgaccggcccccggcuccacagcuccgccagcucacggcgugacauccgccccagacacccgaccagcucccggcucaacagcaccuccugcacauggcgucacaagugcucccgacacccgaccugcuccuggcuccacggccccacccgcucacggaguaacaucagcuccagacaccagacccgccccugggucaacugcaccacccgcccauggaguaaccucagcacccgauacacgaccagccccagguagcaccgccccacccgcacauggggucacaucagcccccgacacccggcccgcacccgggaguacagccccuccugcccacgguguuacauccgccccagauacaagaccugcccccggaagcaccgcaccucccgcucacgguguaaccuccgccccugacacccgacccgcucccggcagcaccgcuccgccagcacauggugugaccuccgccccugauacccgcccagcacccggguccaccgccccucccgcucauggcgucaccuccgcccccgacaccagaccugcccccggguccacugcaccaccagcacacggcgucaccucagcacccgacacacgcccagccccaggcucaaccgcacccccugcccacggagucaccuccgccccagacaccagaccggcaccaggcagcacagcuccaccagcccauggagucacaucagcaccugauacucgccccgcccccggcuccacagcuccgccagcacacggugucaccucugcuccugacacucgccccgcacccgguucuacagcacccccagcccacggcguaaccuccgcucccgacacacgccccgcaccagguuccacugcaccaccagcccauggagucacaagcgcucccgauacccgaccugcacccgguuccacagccccucccgcacacggcgugacauccgccccugauacccgcccugcacccggaagcacagcacccccagcacauggaguaacaucugcacccgacacucgcccugcgccaggcucuaccgcacccccagcucauggaguuaccuccgcccccgauacaagacccgccccuggauccacagccccaccggcccacggagugaccuccgcacccgacacccgcccugccccaggcuccacagcuccaccagcacacggcguaaccucagcaccagauacacguccugcaccaggcuccaccgccccacccgcacacggaguuacuagcgcacccgacacccgacccgcaccaggauccaccgcuccaccagcucacggcguaacguccgcaccugacacacgacccgcaccuggcuccacagccccgccugcccacggugugaccucugcccccgauacccguccagcccccgguuccaccgcuccacccgcccauggagucacuucugcgcccgacacgcggccagcucccggaucaaccgccccuccggcccaugggguaacaagugcaccagacaccagacccgcacccggauccacugccccacccgcccacggaguaaccuccgcccccgacacgcgucccgcccccggcuccacagcucccccggcgcacggaguaaccuccgcccccgacacucggcccgcccccgguuccaccgccccucccgcacauggcgucaccagcgcaccagauacacgccccgccccugguuccaccgccccaccagcccacggcguaaccucggcgccggauacacgccccgcaccaggauccaccgccccucccgcucauggcguuacaucggcucccgacacccgucccgccccaggaagcacagccccacccgcccaugguguuacaucagcacccgacacucggcccgccccaggauccaccgcacccccugcccacggugucacauccgcccccgauacccguccagcaccaggauccaccgccccgccugcccauggugucaccucugcaccagacacacgccccgcuccgggauccacagcuccacccgcccacggcguuaccucugcccccgauacccguccagccccaggaucuacugcacccccggcccacggugucacgucagcccccgauacucgucccgcacccggcuccacagccccgcccgcccacggaguaacaagcgccccugauacacgccccgccccuggauccacagcacccccggcccauggcgucacauccgccccggacaaccgacccgcccucggguccaccgccccucccguccacaacguaacguccgccuccggauccgcaucaggaucagcgagcacccuaguccacaauggcacauccgcacgagccacaacaacgcccgccaguaaaucaaccccauuuuccauccccucacaccauucagauacacccacaacacuagcaucucacuccacuaaaaccgacgcauccucaacccaucacucuucgguacccccucugaccagcucaaaccacuccaccucaccccaacucucaacugguguuucuuucuucuuucuuucauuucacaucuccaaccuccaauucaacaguagccucgaagacccuagcacugacuacuaccaagaauuacaacgugacauauccgaaauguuccuccaaaucuacaaacaaggcgguuuucucggccucucuaacaucaaauuucguccaggcucugucguuguacaacugacccuugcuuuccgcgaagguacaauuaacguacacgacguagaaacccaauuuaaccaauacaaaacugaagccgcaucucguuacaaucuuaccaucucugacgucuccguauccgacguuccauucccauucucagcccagucaggugcgggcguaccaggauggggaauugcucuacucguucucguaugcgucuuaguagcucucgccauagucuaccuaauagcucucgcugucugucaaugucgccgcaaaaacuacggccagcucgauauauucccagcaagagacacauaccauccaaugagcgaauacccgacauaccauacccacggacgcuauguucccccauccaguaccgaucgaucccccuacgaaaaaguauccgcagggaacggcggaucuucucuauccuauacaaacccugccguugccgccgcgucugcaaaucucuga

SEQ ID NO: 4381 - RNA, 2136 nt, Artificial Sequence
  NM_032853 variant
augauggcagacgcaaaguacguccucugccgaugggagaaaagacuuuggccagcaaaaguccuagcccgcaccgccacuucaaccaaaaacaaacgccgcaaagaauacuuccuagcuguccaaauccugucacucgaagagaaaauuaaaguaaagucaacagaagucgaaauccuagaaaaaucccaaaucgaagcuaucgccucaucccuagccucacaaaacgaagucccagccgccccacuagaagaacuagccuacagacgaucacuaagaguugcacucgaugugcucagcgagggcuccauauggucgcaagaaaguucagccggaacaggccgagcagaccgaucccuccgagguaaacccauggaacacguaagcucccccugcgacagcaacucuagcucucucccacgaggugacguccucggaucuucaagaccacaccgacgacgacccugcguacaacaaucccuauccucuucauuuaccugcgaaaaagaccccgaaugcaaaguagaccacaaaaagggccuccgaaaauccgaaaacccaagaggaccccucguacugcccgccgguggcggcgcacaagacgagaguggcucccgaauacaccacaaaaacuggacacuagccagcaaacguggcggcaacucagcucaaaaggcaucccucugcuuaaacggcuccucccucuccgaagacgacaccgaacgcgacaugggcagcaaaggaggcagcugggccgcucccucacucccaucaggaguacgcgaagaugaccccugcgccaaugccgaaggacacgaccccggacucccccucggcucccuaacugccccgccagcacccgaacccagcgcaugcuccgaacccggagaaugcccagccaaaaagcgcccacgccuggaugggucacagcgcccacccgccguucagcucgaacccauggcugccggcgcagccccaucacccggaccgggcccgggaccccgagaaucagucacgccccgcucaacagcacgcuuaggcccaccacccucccacgcauccgcagacgccacacgcugccuccccugcccugacagccaaaagcucgagaaagagugccaaagcuccgaagaaagcaugggaagcaacucgaugaggucgauccuugaagaagacgaagaagacgaagaaccuccacgagugcuccuauaccacgaaccacgcagcuucgaaguaggcaugcuagucuggcacaaacacaagaaauacccuuucuggccagccgucgucaaaucuguccgccaaagagacaagaaagcaagcguacuauacaucgaaggccacaugaacccaaaaaugaaaggauucaccgucucgcuaaaaucacucaaacacuucgacugcaaagagaaacaaacccuacuaaaccaggccagagaggacuucaaccaggacauaggcugguguguaagccucaucaccgacuaccgagugcgacuuggcugcggaucauucgcuggcucauuccuagaauacuacgccgcggacauaaguuacccaguccgaaaaucaauacaacaggauguacugggaaccaaacucccacagcuaagcaaaggcucacccgaagaaccggucgucggaugcccacuaggccaacggcaaccaugcagaaaaaugcuccccgacaggucacgagccgcccgcgaccgggcaaaccaaaagcuagucgaguacauuguaaaagccaaaggagcagaaagccaccuacgcgccauccuaaaaucacgcaaaccuagucgcuggcuccaaacauuccuauccucgucacaauacguuaccugcgucgaaacauaccucgaagacgaaggccaacucgaccucgucgucaaauaccugcaaggagucuaccaagaagugggcgccaaaguccuacaacgcacgaacggagaccgcauccgauucauccucgacguccuccucccggaagccaucauaugcgcaaucucagcagucgacgaagucgacuacaaaaccgcagaagaaaaauacauaaaaggcccaagccucagcuaccgcgaaaaagaaauauuugacaaccagcuccuggaggaacgcaacagacgccggagauga

SEQ ID NO: 4382 - RNA, 438 nt, Artificial Sequence
  AAD44697 variant
augaccguccacaaccucuaccucuucgaccgcaacggcgucugccuccacuacuccgaauggcaccgcaaaaaacaagccggcauccccaaagaagaagaauacaaacucauguacggcaugcucuucuccauccgcuccuucgucuccaaaauguccccccucgacaugaaagacggcuuccucgccuuccaaaccucccgcuacaaacuccacuacuacgaaacccccaccggcaucaaagucgucaugaacaccgaccuaggcgucggccccauccgcgacguccuccaccacaucuacuccgcccucuacgucgaacucgucgucaaaaacccccucugcccccucggccaaacaguccaauccgaacucuuccgcucccgccucgacuccuacguccgcucccuccccuucuucuccgcccgcgccggcuaa

SEQ ID NO: 4383 - RNA, 1395 nt, Artificial Sequence
  AAH02712 variant
augccauccugcuccaccuccacaaugcccggaaugauauguaaaaaccccgaccucgaauuugacucgcuucaaccauguuucuacccagacgaagaugacuucuacuucggaggaccagacucuaccccacccggagaagacauuuggaaaaaauucgaacuacuaccaaccccaccccucucgccaucccgaggcuuugccgaacacucauccgaacccccauccugggucaccgaaaugcuacucgaaaacgaacucugggggagcccagccgaagaagacgcauucggccuaggcggccucggcggccucacacccaaccccgucauccuccaagauugcauguggucaggcuucuccgccagagaaaaacucgaacgcgccgucuccgaaaaacuucaacacggcagagguccccccaccgccgguucgacagcccaauccccaggcgcaggagccgccucacccgccgggagaggacacggcggcgccgcaggcgccggccgugccggagccgcccugcccgccgaacucgcccaccccgccgccgagugcgucgaccccgcuguaguuuuccccuuccccgucaacaagcgagaaccagccccaguccccgccgccccagcuuccgcccccgcagccggcccagccguagccuccggcgccggaauagcagcacccgccggagcccccggcgucgcaccccccagacccggcggccgccaaaccucaggaggagaccacaaagcccucucaaccuccggcgaagacacccucucagacucagacgacgaagacgacgaagaagaagacgaagaagaagagaucgauguagucacaguagaaaaacgacguagcuccucaaacaccaaagccguaacaaccuucaccauaacuguccgccccaaaaacgcagcacuaggcccaggccgcgcccaaagcucagagcucauccuaaaacguugccuuccuauacaccaacaacacaacuacgcagcccccagccccuacgucgaauccgaagacgcccccccccaaaaaaaaaucaaaucagaagccuccccccgcccucuaaaauccgucauaccacccaaggcgaaaagccucucaccccgcaauuccgacuccgaagacuccgaacgacgccgaaaccacaacauccucgaacgacaaagacgcaaugaccuacgaucguccuuccucacacuccgcgaccacgucccagaacucgucaaaaacgaaaaagcagccaaaguagucauacucaaaaaagccacagaauacguccacucacuccaggcagaagaacaccagcuucuccucgaaaaagaaaaacuacaagcccgucaacaacagcuccucaaaaaaauagaacacgcacgcaccugcuaa

SEQ ID NO: 4384 - RNA, 3132 nt, Artificial Sequence
  AAC78645 variant
augccccuccucgagggaagcgucggcguagaggaccuaguccuacuggaaccccucgucgaggagucccuccucaaaaaccuacaauuaagauacgaaaacaaggaaauauauacguacaucgggaacguagucaucuccgucaaccccuaccaacagcuccccaucuacgggcccgaguucauagccaaguaccaagacuacacauucuacgaacucaaaccacauaucuacgcccucgcaaacguggcauaccagagccuacgcgaccgggaccgagaccagugcauccugauaacaggagaaucaggaagcggcaaaacagaagcaucuaaacucgucauguccuacgucgcggccgucuguggcaaaggggaacaagucaacaguguuaaagaacaacuccuucaaagcaaccccguucucgaagcauucgggaacgcaaaaacaauccgcaacaauaacucaagccgauucggaaaauacauggacauagaguucgacuucaaaggaagcccacucgggggagucaucaccaacuaccuccuggagaaaagucgacugguaaaacagcuaaagggcgaacgaaacuuucauaucuucuaucaacuccuagccggagcagacgaacagcuacuaaaagcccucaaacuagaacgcgacaccaccggcuacgcauacuugaaccacgaagucucccgcgucgacggaauggacgacgccucauccuuuagggcgguucaaucugcuauggcaguuaucggcuucuccgaagaagaaauacgacaaguacuugaagucacaagcaugguccuaaagcucggaaacguccucguggcagacgaguuccaagccuccggcaucccggcaagcggaauccgggacggccguggcguacgagaaauaggggaaaugguaggacuaaacagcgaagaagucgaaagagcacuguguucgcgaacuauggaaacagcaaaggaaaaagucgucacugcacucaacguaaugcaggcccaauacgcccgagacgcacucgccaaaaacauuuacagccgacuguuugacuggaucguuaaccggaucaacgaauccauaaaagucggcaucggagagaaaaagaaagucaugggaguccuggacaucuacggcuucgaaauauuagaagacaacucauucgagcaauucgucauaaacuacuguaacgaaaaacuccaacagguuuucaucgagaugacucucaaagaggaacaagaggaauacaagagggaaggaauccccuggacgaaggucgauuacuucgacaacggcauaauaugcaaacuaaucgaacacaaccagagaggcauucuggcgaugcucgacgaagaaugccuacgacccggcgucguguccgacagcacauuucucgcaaaacugaaucaacucuucucaaaacacggccacuacgaaagcaaggucacacagaaugcccaaagacaauacgaccacaccaugggccucagcugcuuucgcauuugucacuacgcuggaaagguaaccuacaacgucaccagcuucauugauaaaaauaacgacuuacucuuuagagaccucuuacaagcgauguggaaagcacaacacccccuacugcggucacuguuuccagaagggaaccccaaacaggcaucgcuaaaaagaccacccaccgcgggcgcccaauucaaaagcagcguggccauccucaugaaaaaccucuacuccaaaucccccaacuacauacgcugcauaaaacccaacgaacaccaacaacggggucaauucucuucagaccuagucgccacacaggcccgcuaccucggacuauuagaaaacguccgaguacggcgagcagguuacgcgcaccggcaaggcuacgggcccuuccuagaacgguaccgacugcugucccgcuccaccuggccacauuggaacggaggggauagggaagggguggaaaagguacucggagaacuauccaugaguagcggggagcuggcuuucggaaaaaccaaaaucuucauccgaagcccgaaaacgcuauucuaccucgaagaacagagacgccuccgucuccaacagcucgccacccucauccagaaaaucuaccgaggauggcgcugcagaacgcacuaccaacuaaugagaaaaagccaaauacuaaucucgucgugguuccgcggaaacaugcaaaagaaaugcuacggcaaaauuaaagcgagcgugcuucucauccaggccuucgugcgaggcuggaaggcccgcaaaaauuaucgaaaguacuuccgcuccgaagcagcgcucacucucgccgauuucaucuacaaaucaaugguacaaaaguuccuacucgggcucaaaaacaaccuaccuagcaccaacguacuagacaaaaccuggccagcagcgcccuacaaaugccucagcaccgcaaaccaggaacuucagcaacuguucuaccaauggaaaugcaaacgauuccgcgaccagcucagccccaaacaagucgaaauacuccgcgaaaaacuaugcgcaucagaacucuuuaagggcaagaaagcaagcuacccacaauccguaccgauaccauucugcggugacuacauaggacuacagggcaaccccaagcuccaaaaacucaaaggaggcgaagaaggaccaguacugauggccgaagccgucaagaaagucaaccggggcaacgggaaaacguccuccagaauacuccuacucacuaaaggacacguaauacuaacggacacaaagaaaucccaagccaaaaucgugauaggccuagacaacguggcgggcguaaguguaacauccuuaaaagacggccucuucucgcuccaccugagcgaaauguccucaguaggcagcaaaggcgacuuccuccuggucucggagcacguaauugagcuacucacgaaaauguaccgcgccguccuagacgcaacgcaacgacaacucaccgucaccgucacagaaaaguucuccgucagauucaaagaaaacagcguagccgucaagguaguccaaggacccgccggcggcgacaacucaaaacuccgcuacaaaaagaaaggcucccacugccuggaagucacaguacaauaa

SEQ ID NO: 4385 - RNA, 3411 nt, Artificial Sequence
  AAH53558 variant
auggccaagauggaggugaagaccagucugcucgacaacaugaucggcgucggagacauggugcugcuggagccccucaacgaggagaccuucaucaacaaccugaagaagcgcuucgaucacuccgagauauacacguacaucggcagcguggucaucucggugaaccccuaccggagccugcccaucuacucccccgagaagguggaggaguaccgcaaccggaauuucuacgagcucagcccccacaucuucgcccugucggacgaggcguaccgcagccuccgggaccaggacaaggaccagugcauccucaucaccggggaguccggcgccgggaagaccgaggccagcaagcugguaauguccuacgucgccgccgugugcggcaagggugcggaagucaaccaggugaaggagcaacugcuccagagcaauccggugcuggaggccuucgggaaugccaagaccguccgcaaugacaacagcagccgguucggcaaguacauggacaucgaguucgacuucaagggggacccgcugggcggggugaucuccaacuaccuacuggaaaagucccgcgucgucaagcagccccggggcgaacgcaacuuccacguguucuaccaacuguuaagcggcgccucagaggagcugcugaacaagcucaaauuagaacgggacuucucccgcuacaacuaccugagcuuagauagcgcgaaggugaacggggucgacgacgccgccaacuuccggacggugcgcaacgccaugcagaucgugggcuucauggaucacgaggccgaguccguccuugcggugguggccgccguccugaagcucggaaacaucgaguucaagcccgagagcagaguaaacggccuggacgagucuaagaucaaggacaagaacgagcugaaggagaucugcgaacucaccgggaucgaccagagcguccuggagcgcgcguucuccuuccggaccguggaggccaaacaggagaaagugagcaccacgcuuaacgucgcgcaggccuacuacgcccgcgacgcgcucgccaaaaaccuguacucccgacuguucaguuggcucgugaaccgcaucaacgaguccaucaaggcgcagaccaaggugcggaagaaggucaugggggugcuggacaucuacggcuucgagauauucgaggacaacagcuucgagcaguucaucaucaauuauugcaaugagaagcugcagcagaucuucaucgagcucacccugaaggaggaacaagaggaguacauucgcgaggacauugaguggacccacaucgacuacuuuaacaacgcgaucaucugcgaucugaucgagaacaacacgaacgggauccucgccaugcuggacgaggagugucugcgcccgggcacggugaccgacgaaaccuuccucgagaagcugaaccaggucugcgccacgcaccagcacuucgagagccggauguccaaguguucucgcuuccugaacgacaccagccugccccacuccugcuuucggauccagcacuacgccgggaaggugcuguaccagguggagggcuucgucgacaagaacaacgaccugcuguaccgcgaccugagccaggcaauguggaaggccucccacgcccugaucaagagccuguuccccgagggcaaccccgcaaagaucaaccucaagcggccgcccaccgcggggucccaauucaaggccagcguggccacccugaugaagaaccugcagacgaagaaccccaacuacauccgcugcaucaagcccaacgacaagaaggccgcccauauuuucaacgaggcgcucgugugccaccagauccgguaccugggccugcucgagaacguccgcgugcggcgcgccggguaugcauuccggcaggccuaugagccgugccuggagcgcuacaaaaugcugugcaagcagaccuggccacacuggaagggccccgcccggagcgggguggagguccucuucaacgagcuggagauccccguggaggaguacuccuucggccgcagcaagaucuuuauccggaacccgcgcacccuguucaaacucgaggaccugcggaagcagcgccuggaagaccucgcgacccugauccagaagaucuaccggggcuggaagugccgcacgcacuuccugcucaugaagaagucccagaucgugaucgccgccugguaccggcgguacgcccagcagaagcgcuaccagcagacaaagagcuccgcccuggucauccagagcuacauacgggguuggaaggcgcgcaagauccugcgggaguuaaagcaccagaagcgcugcaaggaggccgugaccaccaucgccgccuauuggcacggcacgcaggcgcggcgcgagcugcggcgcuugaaggaggaggcccggaacaagcacgcuaucgccgugauuugggccuacuggcuuggguccaaggcgcgccgagagcugaagcgccuaaaggaggaggcccggcgcaagcacgcgguugccgugaucugggccuacuggcucggccugaaggugcggcgcgaguaccggaaguucuucagagcgaacgccggcaagaagaucuacgaguucacgcugcagcggaucguccagaaguacuuccucgagaugaagaacaagaugcccagccugagucccauagauaagaacuggcccagccgcccguaccuguuccucgauucgacccacaaggagcugaagcgcaucuuccaccuguggcggugcaagaaguaccgcgaccaguucacggaccagcagaagcucaucuacgaggagaagcuggaggccagcgagcuguucaaggacaagaaagcccucuaccccucgagcgugggccagcccuuccagggcgcuuaccuggaaaucaauaagaaccccaaguacaagaagcugaaggacgccaucgaggagaaaauuaucaucgcggagguagucaauaagauuaaccgggccaacgggaaaagcacgagccgcaucuuccuccugaccaacaacaaucugcuccuggccgaccagaaguccggccagaucaagagcgaggugccgcugguggacgucacaaaggugagcauguccagccagaacgacggguucuucgcggugcaccucaaagagggcuccgaggccgccucuaagggcgacuuucuguucuccagcgaccaccugaucgagauggccaccaagcucuaccggacgacccugucccagaccaagcagaagcugaacaucgagaucagugacgaguuccucguccaguuccgccaggacaagguuugcgucaaguucauacaggggaaucagaagaacggcuccgugccuaccuguaaacggaagaacaaccgccugcuggaggucgccguucccuga

SEQ ID NO: 4386 - RNA, 3192 nt, Artificial Sequence
  CCDS42226.1 variant
auggcacuucaaguugagcucgucccaaccggagagauaauccgcguaguacacccacaccgaccaugcaaacucgcccucggguccgacggaguccgagucaccauggagucagcccucacagcgagagaucgggucggaguccaagacuucguccuccuugaaaauuuuacauccgaagcagccuucauagagaaccuccgcaggcguuuccgcgagaaccucaucuauaccuacaucggaccaguccucgucagcgucaacccauacagagaccuacaaauauacagccgacaacacauggaacgcuacaggggcgucucuuuuuacgaaguaccaccccaccucuucgcuguggccgacaccgucuaccgcgcucuaaggaccgaaagacgggaccaagcggucaugauuuccggcgagucaggggccggaaagaccgaagccacaaaacgacuccuccaauuuuacgccgaaacuugccccgcgcccgaaagaggcggcgcagugcgagaccgccuauuacaauccaaccccguccucgaagccuuuggaaacgcaaaaacacuacggaacgauaacaguucuagguuuggcaaauacauggacguucaauucgauuucaaaggcgcccccgucggcggacacauccugucauaccugcucgaaaaaucacgcgucguacaccaaaaccacggcgaaaggaauuuccacaucuucuaccaacuacucgaaggcggcgaagaagagacauuacgccgucuaggucuagagaggaacccccaguccuaccuauaccuggucaaaggccagugcgccaaggucuccuccauaaacgacaaaucagacuggaaagucguacgcaaggcacucacagucauugacuuuaccgaagacgaagucgaagaccuacuaucaaucgucgccagugugcuacaucucgguaacauccacuucgccgccaacgaagaaagcaacgcccagguaaccacagaaaaccaacuaaaauaccucacacgccuccuuucgguugagggaagcacgcuccgagaagcccugacccaccguaagaucaucgccaagggagaagaacuucugagcccucuaaaccuagaacaagcugccuacgcccgagacgcccucgcaaaagcggucuacagccgaacguucacauggcuagucggaaaaaucaaccggucguuagcuucaaaggacguagaaagcccauccuggcgaucuacaacaguacugggacugcuggacaucuacgguuucgaaguuuuucaacacaacucuuucgaacaauucugcauaaacuacugcaacgaaaaacuacaacaacucuucauagaacucacguuaaaaucagaacaagaagaauacgaagcagagggaaucgccugggaaccuguacaauauuucaacaauaaaaucauaugcgaccucguggaagaaaaauucaaaggaauuaucucaauucuugacgaagaaugccuacgaccgggcgaggccacagaucucaccuuccuggagaagcucgaagacaccguuaaacaucauccgcacuuccuaacacacaaacucgccgaccagcgcacucgaaaaucucuuggacgcggcgaauuucgccuccuucacuaugcgggcgaagucaccuauagcgugaccggcuuccucgacaaaaacaacgaccuccuauuccgcaacuuaaaagagaccaugugcucuaguaaaaacccgauuaugucccaauguuuugacagaagcgaacuaagugauaagaaacguccagagacagucgccacgcaauucaaaaugagccuacuccagcuagucgaaauccuacaaagcaaggaaccagccuacguccggugcauaaaacccaaugacgccaaacaaccaggccgcuuugaugaaguacuuauccgacaucaaguaaaauaccuuggucuucuagaaaaccuucgcgugcgucgggcgggauucgccuaucgaagaaaauacgaagccuuccuacaacgcuacaaaucccucugccccgaaaccuggccaacaugggccggccgcccacaagacggcguggccguacuugucagacaccuaggcuauaaacccgaagaguacaaaaugggcaggaccaaaaucuucauacgauuuccaaaaacccuauucgcaacugaagacgcccucgaaguacgacgacaaucacuagccaccaaaauccaagcagccuggcgcggcuuccacuggagacaaaaguuccuccgugucaagcggagcgccaucugcauccaauccugguggcgcggaacacucggccgaagaaaagcggcaaaacgaaaaugggcagcccagacaauacgucgccucauccgaggauucguacuacgacacgcaccccggugcccagaaaacgccuuuuuccucgaccacguccgcacuucauuccugcucaaucuccgccggcaacuuccacaaaacgugcuggacaccucauggccaacacccccacccgcgcuccgcgaggccagcgaacuacuccgagaacuaugcauuaagaacauggucuggaaguacugccgcuccauuucacccgaauggaaacaacagcugcaacagaaagcaguugcaagcgagaucuuuaaaggcaagaaagacaacuauccacaaucagucccacgauuguucaucagcacucgacucggcaccgacgagaucucaccccgcguccuacaagcgcucggauccgaaccaauccaauacgccguccccgugguaaaauacgaccgcaaagguuauaaaccccgaucccgucagcuccuacucacaccuaacgccguaguaauugucgaagacgcaaaaguaaaacaacggaucgacuaugccaaccuaaccggcaucuccguaucaagccucucagacucacucuucgucuugcacguccaacgcgcggacaacaaacaaaaaggcgacgucguacugcaaagcgaccacgucaucgaaacccuuacgaaaaccgcacuuucagcaaaccgcguuaacuccaucaacauaaaccaaggaagcaucaccuucgcgggcggaccugggcgagacggcaccaucgacuucacgccuggcuccgagcuacuaaucaccaaagcgaaaaacggacaccuagcgguaguagcaccccgacuaaacuccagauga

SEQ ID NO: 4387 - RNA, 3021 nt, Artificial Sequence
  AAI46764 variant
auggcggaacaggaaucucuagaguucgggaaagccgauuucguguuaauggacaccgucucaaugccagaauuuauggcaaaucuccgacuacgguucgaaaaaggccggaucuacacuuucaucggagaagugguagucucaguaaacccauacaaacuccuaaacauauacggacgggacaccauagaacaauacaagggacgagaacucuaugagagacccccucaccuuuucgccauagcugacgcggccuacaaagcgaugaaacggcgcuccaaagacacuugcauaguaauuuccggggaguccggagcggguaaaaccgaggccuccaaguacaucaugcaguauauagcggccauaaccaaccccucccaacgagcagagguggagagagucaagaauaugcuucugaaauccaauugcguccuagaagccuucggaaacgcaaaaacaaaccgcaacgacaacuccagucgauucggaaaauacauggacaucaacuucgacuucaaaggagauccaaucggaggucacauaaacaacuaccuacucgagaaaagucgcgugaucgugcaacaacccggagaacgcucauuccacucauucuaccagcugcuccagggcggaucagaacaaaugcuacgauccuuacaccuacagaagucccuaucuucauacaacuacauucacguaggagcccaacucaaauccagcauaaacgacgcagccgaguuccgcgucguggccgacgcaaugaaagucaucgguuucaaacccgaagaaauacaaaccguauacaaaauacuagccgcuauccugcaccuuggaaaccuaaaauucgucgucgauggcgacaccccucucaucgaaaacggcaaagucgugucaaucaucgccgaacuccuaucaacgaagacagacauggucgaaaaagcccuucucuaccgcacggucgccacuggacgcgacaucauugacaaacaacacaccgaacaagaagcaucauacggccgcgacgccuucgccaaggccauuuaugaacgccucuucugcuggaucgucacccguaucaacgacauaaucgaaguaaagaacuaugacacgacaauccacggaaagaacaccgucaucggcguccucgauaucuacggguucgaaaucuuugacaacaacuccuuugaacaauuuugcaucaacuacugcaacgaaaaacugcaacaacucuucauccagcuagugcucaagcaagaacaagaagaguaccaacgagaagguauaccuuggaaacacaucgacuacuucaacaaccaaauaauagucgaccuagucgaacaacaacacaagggaauaauagccauccucgacgacgcaugcaugaacguugguaaagugaccgacgagauguuccuagaagcccucaacucgaaauuggguaaacacgcccauuucuccucacggaaauugugcgcaucagacaaaauacucgaguucgaccgcgacuuccgcauacgccauuacgcaggcgacgucguguacucagucaucggcuucaucgauaaaaacaaagacacccuuuuccaagacuucaaacgacugauguacaacagcagcaacccgguccucaaaaacauguggcccgaaggaaaacuaagcauuaccgaaguaaccaaacgaccacuaacagcagccacccuauuuaaaaauucaaugaucgcgcucguagacaaccuugccucgaaagaaccauacuacguacgcugcaucaagcccaacgacaagaaaagcccccaaaucuucgacgacgagcgaugccgacaccaagucgaauaccucggucuccucgaaaauguacgcgucaggcgcgcgggcuucgccuuccgccaaacauacgaaaaauuccuccacagauacaaaaugaucagcgaguucaccuggccaaaucacgaucuacccucagacaaagaagcaguaaagaaacucaucgaacgcugcggauuccaagacgaugucgccuacggcaaaacaaagaucuuuauaagaacaccccgcacccuguucacacucgaagaacuacgcgcgcaaaugcucauccgaauaguacuauuccuccaaaaggucuggagaggaacucucgcgcgcaugcgcuacaagagaaccaaagcagcccuaaccauaauccgauacuaucgacgcuacaagguaaaaucauauauccacgaaguagccagacgcuuccacggagucaagacuaugcgcgacuacgguaaacacgucaaauggcccuccccacccaagguauuaagacgguucgaagaggcacuacagacaauuuucaaccgauggagagccucacagcuaaucaaguccauaccagccagcgaucucccucaaguccgagcaaaagucgcugccgucgagaugcucaaaggacagcgcgccgaccuaggccuacaaagagccugggagggaaauuacuuagccucuaaacccgacacaccccaaacaaguggcaccuucguaccgguagccaacgagcugaaacgcaaagacaaauacaugaacguccucuucuccugccacguccgcaaagucaaccgauucuccaaagucgaagaccgagccauauucguaaccgaccgccaccucuacaaaauggaucccacuaagcaauauaaagucaugaaaacaauaccacucuacaaccucacaggccugagugugagcaacggcaaagaccagcuagucgucuuccacaccaaggacaacaaagaccucaucgucugucuuuucuccaagcaaccaacacaugaaucuagaaucggagaauuagucggaguguuaguaaaccacuucaaauccgaaaagcggcaucuacaagucaacguaacgaaccccguccaaugcucuuuacacggcaaaaagugcacugucagcgucgaaacccgccucaaccagccccagccggacuucacaaagaaucggaguggcuucauacugagcguaccgggaaacuag

SEQ ID NO: 4388 - RNA, 3327 nt, Artificial Sequence
  CCDS32254.1 variant
augggcagcaaaggcguguaccaguaccacuggcagucgcacaacgucaaacacuccgggguagacgacaugguacuacucucaaaaaucacggaaaacucuaucgucgaaaaccugaagaaacgcuacauggacgacuacaucuucacauacauuggcucuguccuaaucuccgucaacccguucaaacaaaugcccuacuucggggagaaagaaauugagauguaccagggggcggcccaauaugaaaacccaccccacaucuacgcccucgccgacaauauguaccgcaacaugauaauagaccgggaaaaccaaugcgugaucauauccggggagagcggagcaggcaagaccgucgcagccaaauacauaaugagcuauaucucacgcgucuccggcgggggcacuaagguacaacacgucaaagauauaauccuacaaucaaacccccuccuugaagcauuuggcaacgcaaagacuguacgcaacaauaacagcucccgcuucggcaaauacuuugaaauacaauucucgccugggggcgaaccggacggaggcaaaauaucaaacuuccuacuagaaaaaucgcgaguagucaugcgaaacccgggagagcgcagcuuccacaucuucuaccaacucaucgaaggcgccagcgcagaacagaaacacagcuugggaaucacuucaauggacuacuacuacuacuuaucacugucaggcucauacaaagucgacgacauagacgaucgacgcgaguuccaagaaacccuucacgccaugaacguuauaggcaucuucgccgaagaacagacacucguccugcaaauagucgcgggcauauuacaccuaggaaacauuagcuucaaagaaguaggcaacuacgccgcagucgaauccgaagaguuccuagcguuccccgcauaccugcuugggaucaaccaagaucgucuaaaggaaaagcucaccucacgccaaauggacuccaagugggguggaaagagcgaaucaauccacgucacccugaacguggaacaagcaugcuacaccagagacgcacuagcgaaagcgcugcacgcacgagucuucgacuuccuagucgacuccaucaacaaagccauggagaaagaccacgaagaauacaacauaggcguccuagacaucuauggcuucgaaaucuuccagaaaaacggcuuugagcaauucugcauuaacuuuguaaacgaaaaacuccaacaaauauucauagagcucacccuaaaggcagaacaggaagaguacguccaggaagguauacgauggacaccaauagaauacuucaacaacaaaaucgugugcgaucucauagaaaacaaaguaaacccacccgguaucaugucgauacuagacgacgugugcgcaacaaugcacgcgguaggcgaaggggcggaccagacacuccuacaaaaacugcagaugcagaucggaucacacgaacacuuuaacucauggaaccaaggcuucaucauacaccacuacgcggggaaaguaucauacgacauggacggcuucugcgaacguaaccgagacguacucuuuauggaucucauagaacugaugcagucaucagaacuacccuucaucaaaagccucuucccagaaaaccuccaagcugacaagaagggccgaccgaccaccgccggcuccaaaaucaagaaacaagccaacgaccuagucagcacccucaugaaaugcaccccacauuacauaaggugcaucaaaccuaacgaaaccaagaaaccaagagacugggaggaaagccgcguaaaacaccagguagaauaccuaggacuaaaagaaaacauccgaguacggagagccggcuacgcauaccggcgcauauuccagaaauuccuccagcgauacgcuauacuuacaaaagcaacauggccaagcuggcaaggcgaagagaaacaaggcguccuacaucugcuccagagcgucaauauggacagcgaccaauuccaacuaggccggucaaaaguguucauaaaagcacccgagagucucuuccugcucgaagaaaugcgagaacgaaaguaugacggauaugcacggguaauccaaaaaucguggcguaaauucguugcaagaaagaaauacguacaaaugcgugaagaggcaucggaccuccuccucaacaagaaagaacgccgaagaaacagcauaaacagaaacuucaucggcgacuacaucggaauggaagaacacccggaacuacagcaauuuguaggcaaacgagagaaaauagacuucgccgacaccgucacaaaauacgaccgcagauucaaaggcguaaaaagggaccuacuccucaccccaaaaugccuguaccugauaggccgagagaaaguaaaacagggacccgacaaaggccucguaaaagagguacuaaaacgcaagaucgaaaucgagcgaauacucucggugagccucagcaccaugcaagacgacaucuucauccuacacgaacaagaguacgacucccucuuggagucgguauucaagacagaguuccuaucacuccucgcaaaacgcuaugaagagaaaacccaaaaacaacucccccugaaauucagcaacacgcucgaacucaaacucaagaaagaaaacugggguccauggucagcaggcgggagcagacaaguacaauuccaccaaggcuucggagaccucgccguacucaaaccaucuaacaaaguacuacaagugucgauuggaccuggacuacccaaaaacucucgaccaacgcgccgcaacacaacccagaacaccggcuacagcagcggcacccagaacgccaacuaccccgugcgcgccgccccaccuccgccgggauaccaccaaaauggcgucauacggaaccaauacgucccuuacccgcacgcgcccggaucccaaagaucgaaccaaaaaucccucuacacaucaauggcccgcccgccgcugccaagacagcaaucaacauccagcgaccgcgugucccaaacaccggaaucauuagauuuccuuaaaguacccgaccaaggagccgcgggcgugcgcagacagacaacaagccgaccaccucccgcgggcggccgccccaaaccucagccaaaacccaaaccgcaagugccccaauguaaagcccuuuacgcguacgacgcucaggacaccgacgaauugucguucaaugcgaaugacaucaucgacaucaucaaagaagauccaagcggcugguggacgggccggcugcguggaaagcaagggcucuuucccaacaauuacguaacgaagauauga

SEQ ID NO: 4389 - RNA, 3297 nt, Artificial Sequence
  AAH28071 variant
auggggagcaaagaaagguuccacuggcaaagucauaacguaaaacaaagugguguagacgacaugguccuccucccgcaaaucacggaagacgccaucgcggccaaccucagaaaacgauucauggacgacuacaucuuuacuuacauaggcagcguacuaaucagcgucaaucccuucaaacaaaugccguacuucacagaccgcgagaucgaccucuaccagggcgccgcccaauacgaaaacccuccacacauauacgcuuuaacggacaacauguacagaaacaugcuaaucgacugcgaaaaccaaugcguaauaaucagcggagaaagcggcgcaggcaagacagucgcagcgaaauacaucaugggauacauaucaaaaguaucaggggguggugagaaaguucagcacgucaaagacauaauucuccaaaguaacccacuccuggaagccuucggaaacgccaaaaccguucgaaacaacaacucaagcagauucgggaaauacuucgagauacaauucucccgcggaggagaaccagauggcggcaaaaucucgaacuuccuccucgagaaaucccggguagucaugcaaaacgaaaacgaacgaaacuuccauauauauuaccaacuccucgaaggugcaucacaggagcaaagacagaaccucggacuaaugacuccagacuacuauuacuaccuuaaccaaagcgacacauaccaaguagacggaacggacgacagaagcgacuucggagagacgcucagcgccaugcaaguaauaggaauaccgcccagcauacaacagcuaguccuacagcuagucgcaggcauucuccaccuggggaacaucaguuucugcgaagacgggaacuacgccagagucgagagcguggaccugcuagcauuucccgccuaccugcuuggaauagacucaggcagacugcaagaaaagcuaacaagucgaaaaauggacagccgauggggagggcgaagcgagucuauaaacguaacccucaacgucgaacaggccgccuacacacgcgaugcacuagccaaagggcucuacgcccgcuuauucgacuuccuaguugaggccaucaaccgggcaaugcagaaaccacaggaagaguacucuauaggaguacuagacauauacggauucgaaauauuccagaaaaacggcuucgaacaauucugcaucaacuucguuaacgagaagcuccaacaaaucuucaucgagcucacacuuaaagcagaacaggaagaauacguccaggaggguauacgcuggacucccauacaguacuucaauaacaaagugguaugcgaccuaaucgaaaacaaacucagucccccuggcaucaugagcguccuagacgacgucugcgcaaccaugcacgcaaccgggggaggcgcagaccagacacugcuccaaaaacuccaagccgcggucgggacacacgaacacuucaacuccuggagugccggcuucguaauccaccacuaugccgggaaggucagcuacgacguaucaggcuucugcgagcgcaaccgcgacgugcuauucucagaccugauagaacuaaugcagacuagcgaacaagccuuccucagaaugcuauucccggaaaaacuagacggcgacaagaaagggcgccccucaacagcaggaucuaaaauaaagaaacaagcaaacgaccugguagcuacccuaaugcgcuguaccccacauuacauacggugcauaaaaccaaacgaaaccaaacgcccaagagauugggaagagaaccgcguaaaacaccagguagaauaccuaggccucaaagaaaauauacgcguacgcagagcaggcuucgccuaccgcagacaauucgcaaaguucuugcaacgauacgcaauacugacccccgaaaccuggccccgcuggcgcggagacgaaagacaggggguccaacaccuccuucgagccgucaacauggaaccggaccaauaccaaaugggcagcacaaaaguauucgugaagaacccugagagccucuuccuacuagaagaaguacgagaacgcaaguuugaugguuucgccaggacaauccagaaagcguggcgacgacacgucgcggugcgcaaguacgaagagaugcgggaggaagcaaguaacauacuacucaacaagaaagaacgacgacgaaacaguaucaaccgcaacuucguaggcgacuacuugggccuagaggaacgaccagaacuucggcaauuccucggcaaacgagagcgggucgacuucgccgacagcgucacaaaauacgaucgccgcuucaagccaauuaagagggacuugauacuaacccccaaaugcguauacgucaucggcagagaaaaaguaaagaaaggcccggaaaaagggcaagugugcgaaguccucaaaaagaaaguagauauccaggcacucagagguguaagccugucaacacgucaggacgauuucuucauccuacaggaagacgccgcugacagcuuccuagaaagcguguucaaaacggaguucgucucgcuacuguguaaacgguucgaagaagccacacgacgcccacuaccacuaacauucuccgacacgcuccaauuccguguaaagaaagaaggauggggaggcggagguacacgaagcgugaccuucagccgcggauucggagaucuagccguacuaaaaguaggagggcgcacacugacaguaucagucggagacggccuccccaaaucuucaaaaccaacgcgaaaaggcauggccaaaggcaaaccacgcagaagcucccaagcuccaacccgcgcagccccggcuccacccagagggauggaccgcaacggaguaccucccucagcacggggaggcccccucccccucgaaauaauguccggagggggaacccaccggcccccgcgcgggcccccaucaaccucccugggcgccagccgcagaccacgcgcacgaccgcccagcgaacacaauaccgaguuccuaaacguuccagaccaaggcauggcagggaugcaaaggaaacguagcguggggcagcgaccgguaccgggcgucggaagaccaaaaccccaacccaggacacacggaccccgaugccgggcacucuaccaauacguaggccaagacgucgacgaacucagcuuuaacgucaacgaaguaaucgaaauucuaauggaagaucccagcggaugguggaaaggcaggcuccacggccaagaagggcuauuccccggaaacuacgucgagaaaauauga

SEQ ID NO: 4390 - RNA, 3057 nt, Artificial Sequence
  CCDS34629.1 variant
auggaagacgaggaaggucccgaauaugggaagccagacuucguacuacuagaccaagucacaauggaggacuucaugcgaaaccuccaacuuagauucgaaaaagggcgcaucuacacauacaucggugaaguccucgucucagugaacccauaccaggaacucccccuauacggcccugaagccauagcccgcuaccagggccgagaacuuuacgagagaccuccccaucucuaugcgguugccaacgcagcuuacaaggcaaugaaacaccgcucccgggauaccugcauaguaauaagcggagaguccggagccgggaaaaccgaagccagcaagcacauaaugcaauauaucgccgccguaacaaaccccagccaaagagccgaaguagaacgcgucaaagacguccuccugaaaucuacgugcguccuugaagcauucggcaaugcucgaaccaaucgcaaccacaacagcucaagauucggcaaauacauggacaucaacuucgacuucaaaggcgacccaaucggcggccacauccacagcuaccuacuagagaaaagccgcguccucaaacaacacgucggcgaacgaaauuuccacgccuucuaccagcuacuccgcgguucggaagacaagcagcuccaugaacuccaccuagaacgcaacccugccgucuacaacuucacccaccagggagccggacucaacaugaccguccacucagcccuugacucggacgaacagagccaccaagcugucacugaggcaaugcgagucauaggcuucucacccgaggaaguagaauccgugcaccguauacucgcagccauacuccaccucggaaacaucgaauuuguagaaacagaggaaggcggacugcaaaaagagggacuagcggucgcagaggaagcccucgucgaccaugucgcagaacuaaccgccacaccccgagaccuuguacuaagaucccuacucgccagaaccgucgccagcggcggccgcgaacugauagaaaaaggccacaccgcagcagaagccucguacgcccgggacgcaugcgcuaaagcagucuaccaacgacucuucgaguggguagucaaccgcauaaacuccguaauggaaccacgaggccgcgacccccgacgagauggcaaagauaccgucauaggagugcuagauaucuacggcuuugagguauuccccguaaacagcuucgaacaauucugcauuaacuacugcaacgaaaaacuacaacaacucuucauacaacuaauccuaaaacaagaacaagaagaauaugaacgcgaaggaaucacuuggcaauccgucgaauauuucaacaacgccaccaucguggaccuagucgagcgaccacaccgaggaauauuagccguccuagaugaggcaugcuccagcgcagguaccaucacugaccgcaucuuccuccaaacccuggacaugcaccaccgccaccaccuccacuacaccagccgacaacucugcccaaccgauaaaacaauggaguucggacgcgacuuucgaaucaaacacuacgcaggcgacguuacauauuccgucgaaggauucaucgacaaaaacagagacuuccuauuucaagacuucaagcggcuccucuacaacuccacagacccaacacuccgcgccauguggcccgacggacaacaagacaucacggaagucacgaaacgcccacucacagccggcacccucuucaaaaacucaauggucgcccuuguugaaaaccucgcaucgaaagaacccuucuacguacgcuguaucaagcccaaugaagacaaggucgccggcaaacuggacgaaaaucacugccgacaccaaguagcguaucucggccuucuugaaaauguccgaguacgcagagcgggauucgcuucccgacaacccuacucgcgcuuccuuuuacgcuacaaaaugacgugcgaauacacuuggcccaaccaccuacucgguagcgacaaagcugcgguaucagcccuucucgaacaacacggccuccagggagacgucgcguucggccauuccaagcucuuuauccgaucaccccgcacgcucguuacacucgaacaaucaagagccagguuaaucccaaucauuguccuccuacuccaaaaagccuggcguggcacccucgcccgauggcggugccgcagacuccgcgcaaucuacacaaucaugcgcugguucaggcgccacaagguacgagcccaccuagccgaacuacaacgcagauuccaagccgcacgucagccuccccucuauggcagagaccucgucuggccacuaccacccgcaguccuacaacccuuucaagacacaugccacgcacuauucugccgguggcgcgcccgccaacucgugaaaaacauaccacccuccgacaugccccagaucaaagcaaaaguagccgcaaugggugcucuccaaggcuuacgccaagacuggggaugccgacgcgccugggcccgcgauuaccuuucaagcgcaaccgacaaccccacagcaucaucacucuucgcacaacgucuaaagacauugcaagacaaagacggcuucggcgccguccuauucagcagccacgugcguaaagugaaccgcuuccacaagauccgcaaccgugcacuucuccucacagaccagcacuuauauaaauuagaccccgaccgacaguaccgaguaaugagagccguuccacuggaagccguaacuggucucagcgucacauccggaggugaccagcuuguaguacuacacgcacgaggccaagacgaccucguggucugccuccaccgaagccgcccaccccuagauaacagagucggcgaauuaguaggcgucuuagccgcacacugccaaggcgaaggaagaacacuugaaguccgcguaucugacugcauuccccucucccaccggggcgugcgcagacuaaucuccguagaacccagaccagaacaacccgagccagauuuuaggugcgccagagggagcuucacccugcuuuggcccagccgauga

SEQ ID NO: 4391 - RNA, 3069 nt, Artificial Sequence
  CCDS53826.1 variant
auggaaggggcccucaccgcccgggacaaagucggagugcaagauuucguacuccuagacgccuacaccucggaauccgcauucguggacaaucuccgcaagcgauucucagaaaaccucaucuacaccuacauuggaacgcuucuagucagugucaacccuuaucaagaacucggaauauacaccgucagccagauggaacuuuaccaaggugucaacuucuucgaacuacccccgcacgucuacgcaauagcagacaacgcauaccgaaugaugugcgccgaacucaacaaccauuucauccucaucuccggggaaagcggagcaggcaaaaccgaagcaagcaagaaaauacucgaauacuucgcagucacgugccccaugacacaaucgcuccaaaucgcucgagaucgccuacuuuucagcaaccccguccucgaggcauucggcaacgcgcgaacguuaagaaaugacaacucaagccgcuucggaaaauacauggacauacaauucgacuuucaggggauaccagucggcggacacaucauaagcuaucucaucgaaaaaucacgagucguguaccaaaacgaaggagaaagaaacuuccacaucuucuaccaacuucucgccggaggcgaggaagaacgacucucauaccuaggucucgaaagagacccgcaacuuuacaaauaccucucucaagggcacugcgcaaaagaaucaagcaucagcgacaaaaacgacuggaaaacgguuuccaacgcauucagcguaaucgacuucaccgaagcggaccucgaaaaccucuucgggaucauagccagcguauugcaccuggguaacaucggauucgaggaagacgaccaaggcugcgcaaccauccccgacacgcacgaaauaaaauggaucgcgaaacuccucggcguccaucccagcguccuacuggaggcacuaacucaccguaaaaucgaagcaaaaacggaagaggucaucugcccacuaacacucgagcuuuccgucuacgccagagacgcgauggcuaaagccguauacgggaggaccuucacaugguuagucaacaaaaucaacaguucccuugucaacaaagacuucacaagaaaaaccgugauaggccuacuugacauauacggguuugaaguuuucgacaaaaacggauucgaacaauucugcaucaacuacugcaacgagaaacuacaacaauuacugauagagcgaacgcuaaaagcggaacaagcugaauacgagauggaagguaucgaaugggagccuaucaaauacuucaacaacaaaaucaucugcgaccucguagaggaacgacacaaaggaaucauaagcauacucgacgaggaaugcaucagaccggguccugcaacggaccugagcuuccuugagaaacuagaagagaaggucggcaaacaugcgcacuucgaaacacgcaagcucgcaggaccaaaggggcgcaaacgaaucggcuggauggaguucagacuccugcacuacgccggagaagugaccuacuguacaaaaggguuccuagagaaaaacaaugaccuccucuaccggcaccugaaggaaguguuaugcaaaagcaaaaacauaauacuacgcgaaugcuuccuccucgcagaacuggaaaaccgacgucgcccaccaacgguaggaacacaauucaaaaacucgcucucaagucuccuugaaacgcugauauccaaagagcccaguuacauacgcugcaucaagcccaacgaccgaaaagaacccucaaaauucgacgacuuccuaaucaggcaccaaaucaaauaccucggccucauggagcaccuccgcguccgacgcgccggauucgcguaccggcggaaauacgagcacuuccuccagcguuauaaaagccugugcccagacaccuggccacacuggcacggaccuccagcagaagggguagagagacucaucaaguacauaggcuauaaacccgaagaguacaaacucgggaagacgaaaauauucauccgcuucccacgcacccuauucgcuaccgaggaugcguucgaguucuccaagcaucagcuggucgcacguauacaagccacuuacaaaagaugccucggccggcgcgaauacgucaagaaacgucaggccgcaauaaaacuagaagcccacuggcgcggagcacucgcccgaaaagcaauccaaagacgaaaaugggcgguacgcauuauacguaaauucauaaaaggguucauuucacgcaacaagccccuaugcccagacaacgaagaguucaucguguucguacggaaaaacuacauccuaaaccuacgauaccaccucccaaaaacgguccuggacaaaagcugguuacggccaccgggaauccucgaaaacgccagcgaccuucuccgaaaaaugugcguaagaaaccuuguacaaaaauacugccgugguauaacggccgaaagaaaggccaugaugcaacagaaagugguaacgagcgaaaucuuucgcggacgcaaggacggcuacacggaaucccucaaccaaccauucgucaacagccgaaucgacgaaggggacaucaaccccaaaguccuccaacugauaucacacgaaaagauacaauacggcguacccguaaucaaauacgacagaaaaggauucaaagcgcgccaacgacaguuaauacucacccaaaaagcggccuacguggucgaacucgcaaaaauaaagcaaaagaucgaauacucggcgcugaagggcguaucaacaagcaaucuaucagacgggauacugguuauucacguauccccagaagacucaaaacaaaaaggggacgcugugcuccaaugcgggcauguguucgaagccguuacuaaacucgugaugcuggucaagaaagaaaacauagucaacgucguacagggaucccuucaauucuucauaagccccggcaaagaagggacaauagucuucgacaccggucuagaagaacaaguguacaaaaacaaaaacggccaacugaccgucguaucggucaggagaaaaagcuag

SEQ ID NO: 4392 - RNA, 2379 nt, Artificial Sequence
  BAC84969 variant
augaucacagucaaccccgacggaaagauaaugguccgacgcugucuagucacccuccgaccauuccgccucuucguccuaggaaucggauucuucacccucuguuuccuuaugaccucccuaggcggccaauucucagcccggcgccucggcgacucccccuucaccauccgaaccgaagucaugggagguccagaaucccguggcguccuccgaaaaaugucagaccuacuugaacucauggucaaacguauggacgcccuugcacgacuagaaaauucaagcgaacuccaccgagccggcggugaucuccacuuccccgccgacagaaugccacccggcgcaggucuaauggaacggauccaagccauagcacaaaacgucuccgacaucgccguaaaagucgaccaaauccuccgacacucucuccuucuacacuccaaggucuccgaaggccgacgagaccaaugugaagcccccuccgaccccaaguuccccgacugcuccggcaaagucgaguggaugcgcgcacgauggaccuccgaccccugcuacgccuucuucggaguagacggcaccgaaugcucauuccugaucuaccucucagaaguagaaugguucugcccaccccuucccuggaggaaccagaccgccgcgcaacgcgccccaaagccacuccccaaaguacaagccgucuuccgcucaaaccucucccaccuacucgaccugauggguagcggaaaagagucacucauuuuuaugaaaaagcgaaccaaacgacucacagcccaaugggcgcuagcagcccaaaggcucgcacaaaaacuaggagcgacccaacgagaccaaaaacaaauucuaguccacauaggcuuccucacugaagaauccggagacgucuucuccccacgagugcucaagggcggcccacuaggagaaaugguacagugggcggacauccucaccgcccuauacguacucggccauggacuccgaguuacugugucacuaaaagaguuacaauccaaccucggagucccucccggccgaggcuccugcccccucacgaugccacuacccuucgaccucaucuacaccgacuaccacggucuccagcaaaugaaacgacacaugggacuaucauucaagaaauaccgcugccgcauacgcgucaucgacaccuucggcacugagccagccuacaaccacgaggaauacgcaacgcuccacggcuaccgcaccaauuggggcuacuggaacuuaaaccccaaacaauucaugaccauguucccccacacgcccgauaacucuuucaugggguucgucucggaagaacucaacgaaaccgaaaaacgccuaaucaaaggcggcaaagccucaaacauggccguagucuacggaaaagaggccucaaucuggaaacuucagggcaaagaaaaauuccuaggaauccucaacaaauacauggaaauccacggcaccgucuacuacgaaucgcaacgacccccagagguacccgcauucgucaaaaaucacggccuccucccacaacccgaguuccaacaacuccuccguaaagccaaacucuucauaggcuucggguucccuuacgaaggccccgcaccacuugaagcaauagccaacggaugcaucuuccuccagucacgcuucagcccaccccacuccucccugaaccacgaguucuuccguggcaaacccacaucuagagaagucuuuagccaacaccccuacgcggaaaacuucauaggcaaaccccacgucuggacaguagacuacaacaacuccgaagaauuugaagccgccaucaaggccauaaugcgcacccaggucgaccccuaccucccauacgaauacacaugcgaaggcaugcucgaacgcauccacgccuauauccaacaccaagacuucugccgagcaccggacccagcccuccccgaagcacacgcaccgcaaucccccuucguccucgcccccaaugcaacacaccuagaaugggcacgcaacacaagccucgcccccggagcauggcccccggcucaugcuuugcgcgcuuggcuagcuguacccggacgcgcaugcacugauaccugccuagaccacggauuaauaugcgaaccguccuuuuuccccuuccuaaacucacaagacgccuuccucaagcuacaagucccaugcgacuccaccgaguccgaaaugaaccaccucuaccccgcauucgcacaaccgggucaagaauguuaccuccagaaagaaccccuccuuuucagcugcgcaggaagcaacacaaaauacagacgccuaugccccugcagagacuucagaaaaggccaagucgcccucugccaaggaugccuauaa

SEQ ID NO: 4393 - RNA, 36 nt, Artificial Sequence
  AF164963.1 variant
augacccaaggccaacacuuccuccaaaaagucuaa

SEQ ID NO: 4394 - RNA, 2211 nt, Artificial Sequence
  AAI11702 variant
augaaagaaaugucggcgaacaccguccucgacucacaacgccaacaaaaacacuacggcauaaccucacccaucucucucgccuccccaaaagaaauagaccacaucuacacccaaaaacucaucgaugcaaugaaacccuucggugucuucgaagacgaggaagagcucaaucacaggcuagucgugcuaggcaaacucaacaaccucgucaaagaguggauaagcgacgucucggaaucaaaaaaccucccccccucaguagucgccaccguuggcggcaagaucuucacauucggcucguaucgccucggaguccacacaaaaggcgccgacauagacgcacuaugcguggccccccgucacgucgaacggagcgacuucuuccagucauucuucgaaaaacugaaacaccaagauggaauccguaaccucagagccguagaagacgccuucguaccagucauaaaauucgaauucgacggaaucgagaucgaccugguguucgcccgacuagccauccaaacuaucuccgacaaccucgaccuacgagacgacucacgacuccgcagccuugauauacgaugcauccgcagccucaacggcugccgagucacugacgaaauucuacaccucguccccaacaaagaaacguuccgccugacccuccgcgccguuaaacucugggccaaacgccgaggaaucuacuccaacaugcucggauuccucgguggugucuccugggcaaugcucguagcccgaaccugccaacucuacccaaacgcggccgccucuacccucguacauaaauucuuccuuguauucagcaaaugggaauggccaaaccccguccuccucaaacaaccugaagaaucaaaccuaaaccugccaguaugggauccacgagucaaccccucugaccgcuaucaccugaugcccauaaucacaccggccuacccccaacaaaauuccaccuacaacgucuccaccuccacccgcacaguaauggucgaggaauucaaacaaggccucgcgguaaccgacgaaauccuccagggaaaauccgacuggucgaaacuccucgaaccaccaaacuucuuccaaaaauaccgccacuacauuguacucaccgccucugcauccacagaagagaaccaccuagaaugggucggccuaguagaaucaaaaauccgaguccuagucggcaaccuagaacgcaacgaauucauaacccucgcccacgugaacccccaauccuuccccggcaauaaagaacaccauaaagacaacaacuacgucuccaugugguuccucggaaucaucuuccgccgcgucgaaaacgcagaaucugucaacauagaccucacauaugacauacagagcuucacagacacagucuauagacaggcaaacaacaucaacaugcucaaagaagguaugaaaaucgaagcaacacacgucaaaaaaaaacagcuucaccacuaccuucccgccgaaauccuccaaaaaaaaaaaaaacaaucccuaucugacgucaacaggagcagcggaggcuuacaguccaaacgccucucccucgacuccucaugccucgacuccagcagggacaccgacaacgggacuccuuucaacucccccgccucuaaaucagacagccccagcguaggagaaaccgaacgaaacuccgcagaaccugcugcagucaucgucgaaaaaccccucucuguacccccagcccaaggccuuucaaucccaguuaucggcgccaaagucgauucuacuguaaaaaccguguccccacccaccgucugcacaaucccaaccgucgucggcagaaacgugaucccccgcaucaccaccccccacaaccccgcccaaggacaaccccaccucaacggcaugucuaacaucaccaaaaccguuacccccaaacggucccacucccccagcauugacggaaccccuaaacgccucaaagacguugaaaaauucauaaggcuugagucgaccuuuaaggacccacgcaccgccgaagagcgcaaacgaaaauccguagacgccaucggcggcgagucgaugcccaucccuacaaucgacacgucucgaaaaaaaagacuccccagcaaggagcuaccagacuccuccucccccguccccgccaacaacauccgcgugaucaaaaacucaauucgccucacccucaaccgauag

SEQ ID NO: 4395 - RNA, 1377 nt, Artificial Sequence
  AAG28389 variant
auguccaccgaaggcggcuucggaggcaccagcuccuccgacgcccaacaaucacuacaauccuucuggccccgagucauggaagaaauccgcaacuuaaccgucaaagacuuccggguacaagaacucccccucgcaagaaucaagaaaaucaugaaauuagacgaagacgucaaaaugauuucugcagaggcaccaguccucuucgccaaagccgcacaaaucuucaucaccgaauuaacccuacgcgccuggauccacaccgaagacaacaaacgacgaacccuccaacgcaacgauaucgccauggcgaucacuaaauucgaccaauucgacuuccuaauagacaucgucccccgcgacgaacucaaaccacccaaacgacaagaagaaguccgccaauccgucacccccgccgaacccguccaauacuacuucacccuagcacagcaacccacagcaguccaaguccaaggccaacaacaaggccagcaaaccacauccuccacaaccaccauccaacccggccaaaucaucaucgcacaaccccaacaaggacaaaccacacccgugaccaugcaagucggcgaaggccaacaaguacaaauaguacaagcccaaccccaaggccaagcacaacaagcccaauccggcaccggccaaaccaugcaagucaugcaacaaauaaucaccaacacaggcgaaauccaacaaauacccguccaacuuaacgcaggccaacuccaauacauucgacuagcccaacccguuucaggcacccaagugguccaaggccagauccaaacucucgcuaccaacgcccaacaaggccagcgcaacgcaucacaaggcaaaccccgcagaugccucaaagaaacccuccaaaucacccaaaccgaaguccagcagggucaacaacaauucucacaauucacugacggccaacgcaauucaguccaacaagccagagucuccgaacuaacaggcgaagcagaaccccgcgaaguuaaagccacaggaaacucaacaccaugcaccucaucccuaccuaccacccacccucccucccacagagccggagccuccugcguaugcugcucacaaccccaacaaagcagcacaucacccccacccuccgacgcccuacaaugggucguagucgaagucucagguacccccaaccaacucgaaacccaccgcgaacuccacgccccucuaccaggaaugaccucacucagcccccuccaccccucccaacaacucuaccaaauccaacaaguaaccaugcccgccggccaagaccuagcccaacccauguucauccaguccgccaaccaaccauccgacggccaagccccacaagucaccggcgacuaa

SEQ ID NO: 4396 - RNA, 2802 nt, Artificial Sequence
  CCDS33423.1 variant
augcguauggcagccacggccugggccggccuacaggggcccccacugccuacguuaugccccgccguuaggacaggccucuacugccgagaccaggcccacgccgaaagaugggccaugacuucggaaaccucaucaggcucccauugcgcccgaucccgcaugcucagaagacgagcgcaagaagaagacucuaccguccucaucgacgugucaccaccagaagcagaaaaacgcggaucauauggauccacagcacacgcauccgaacccggcggccaacaagccgcggccugccgcgccggcucacccgccaaaccaagaaucgcagacuucguacucgugugggaggaagacuuaaagcuagaccgacaacaagacucagcagcccgcgaccgcacagauaugcauaggaccuggcgcgaaacauuccucgacaaccuacgcgcagccggccucugcgucgaucaacaagacguccaagacggcaacaccacgguacauuacgcccuacuauccgccucaugggccguacucugcuacuaugcagaggaccuccgccuaaagcucccgcuacaagaacuccccaaccaagccucgaacugguccgccggacugcuagcauggcuaggaaucccaaacguacuucucgaggucguccccgacgucccacccgaauauuacuccugccguuuucgcgucaacaaacuccccagauuccugggcuccgacaaccaagacacauuuuucacuucgacgaaacgacaccaaauacucuucgaaauccuagcaaaaacccccuacggacacgaaaagaaaaaccuccugggcauacaccaacuacucgccgaaggcguucucucagcagcauucccacuacacgauggaccauucaaaaccccgcccgaagggccccaagcccccaggcucaaccaacgccaaguacucuuucaacacugggcccgcuggggcaaauggaacaaauaccagcccuuagaccacguccgaagauacuuuggcgaaaaaguagcacuuuacuucgcauggcucggcuucuacaccgguuggcuacugcccgccgcaguagucgguacccuagucuuccucgucggcugcuuccucgucuucagcgauauccccacccaagaguuaugcggcucaaaagacucauucgaaaugugcccccugugucucgacugcccuuucuggcuccucuccagcgccugugcacucgcacaagccggccgccuuuucgaccacggaggaaccguuuucuucucccuauucauggcacucugggccgugcugcuccuagaguacuggaagagaaaaucugccacccucgccuaccgcugggacugcuccgacuacgaagauacagaagaacgcccaagaccgcaauucgccgcuucagcaccaaugaccgcaccgaacccuauaaccggagaagacgaaccguacuucccagaaagaucacgcgcacgcagaaugcuggcaggcucaguaguuaucgugguaaugguagccgucgucguaaugugccucguuucaauuauccuauaccgcgcaaucauggcuaucguagugucacgaucgggcaacacccuauuagcggccugggcgucacgcauagccucccuaacgggcagcguaguaaaccuugucuucauucuaauccucagcaagaucuauguuucccucgcacacguacuaacaagaugggaaaugcaucguacccaaaccaaauucgaggacgcuuucacacuaaaaguuuucauauuccaauuuguaaacuucuauuccucgccaguauacauagcuuucuucaaaggccgguucguaggauaccccggcaacuaccacacccuauucggcguucgcaacgaagaaugcgccgcugggggaugccucauagagcuagcacaagaacuucuagucauaaugguuggcaaacaggucaucaacaacaugcaagaaguacuaauccccaaacuaaaaggaugguggcaaaaauuccgacuucgaucaaagaaacguaaagcaggcgccagcgccggagcaucacaaggcccaugggaagacgacuaugagcuagugccaugcgaaggccuauucgacgaauaccuugaaaugguacugcaguuuggcuuuguaaccaucuucguggccgccugcccacucgcaccccuauucgcccucuuaaauaacuggguugaaauccggcucgacgcccgcaaauucgucugcgaguacagacgaccaguggcugaacgcgcccaagacauaggcaucugguuucacauacuggccggccucacacaccucgcagugaucuccaacgcauucuuacuagccuuuagcagcgacuuccuaccaagggccuacuaccgcuggacuagagcacacgaccuccgaggcuuccuaaacuucacccuagcacgagcacccuccuccuuugccgccgcgcacaaccgcacaugcagauaucgcgcuuuucgcgacgacgauggccacuacucacaaaccuacuggaaccuucucgccauccgacucgcauucgucauugucuucgaacacguuguauucucugucggucgccuccuagaccugcuaguacccgacaucccagaaucaguggagaucaagguuaaaagagaauacuaccucgcaaaacaagcucucgcagaaaacgaaguccuguucggaaccaacggaaccaaagacgaacaaccugagggaucagaacuaucaucgcacuggacucccuucaccguaccaaaagccucucaacuucaacaauag

SEQ ID NO: 4397 - RNA, 885 nt, Artificial Sequence
  AAA36380 variant
auggaagacagcauggacauggacaugagcccccuccgcccacaaaacuaccucuucggaugcgaacuaaaagccgacaaagacuaccacuucaaaguagacaacgacgaaaacgaacaccagcuaagccuaagaacaguaagccuaggagccggagcaaaagacgaacugcacaucguagaagcagaagccaugaacuacgaaggaagucccauaaaaguaacccuggcgacacuaaaaauguccguccaacccacaguaagccuaggaggauucgaaauaacaccgcccgucguacuacgccuaaaaugcggcagcggcccaguccacauaagcggccaacaccucguagcagucgaagaagacgccgaaagcgaagacgaagaagaagaagacgucaaacuacuaagcauaagugggaaaagaagcgcaccaggaggcggcagcaaaguaccacaaaaaaaaguaaaacuggcagccgacgaagacgacgacgacgacgaugaagaagacgacgacgaagacgacgacgacgacgacuucgacgacgaagaggccgaagaaaaagcacccguaaaaaaaagcauaagagacacgccagcaaaaaacgcacaaaaaagcaaccaaaacggcaaagacagcaaaccaagcagcaccccacgcagcaaaggacaagaaagcuucaaaaaacaagaaaaaacaccgaaaaccccaaaaggccccagcagcguagaagacauaaaagcaaagaugcaagcaagcauagaaaaaggaggaagccucccaaaaguagaagcaaaauucaucaacuacguaaaaaacugcuuccgaaugaccgaccaagaagcaauacaagaccuauggcaauggagaaagagccucuaa

SEQ ID NO: 4398 - RNA, 3915 nt, Artificial Sequence
  CCDS47686.1 variant
augcaacucaaaauuaugcccaaaaagaaacggcucagcgccggcagagucccccuaauccuguuccuaugccaaaugaucuccgcccucgaaguaccgcuagacccaaaacuccucgaagaccuaguacaaccaccaacaaucacgcaacaaucaccgaaagacuacauaaucgauccacgcgaaaauauagucauacagugcgaagccaaaggcaaacccccgcccuccuucuccuggacccgaaacggcacccauuucgacauugacaaagauccccuagucaccaugaaaccagggaccggcacacuaaucaucaacaucauguccgagggcaaagcagaaaccuacgagggaguauaucaaugcaccgcaagaaacgaacgcggcgccgccguuuccaacaacauuguaguccgacccucacgcagcccacuguggacaaaggagaaacuagagccaauaacccuccaauccggacagagcuuagugcuacccugccggccacccauaggacuaccaccgcccaucauauuuuggauggacaacagcuuccaacgacugccucaaucagaaagagucucccaaggccuaaacggcgaccuauacuucucaaacguacuacccgaagacacccgugaagacuacaucugcuacgcacgguucaaccacacgcaaaccauacaacagaaacaacccauaagugucaaggucauaagcgucgacgaguuaaacgacaccauugccgccaacuugucagacaccgaguucuacggugccaaaagcucacgcgaacgcccuccaaccuuccuaacccccgaaggaaacgcaagcaacaaagaagaacuucgugguaacguacucucacucgaaugcaucgcggaagggcugcccacccccauuauauacugggccaaggaagacggcauguuaccaaagaaccgcacagucuauaaaaauuucgagaaaacucuacaaauaauccacguguccgaagccgauucgggaaacuaccaaugcaucgcaaagaacgcgcuuggcgcaauacaucacacgauaucaguccgagucaaggcggcacccuauuggauaacagcuccccaaaaccucguccucucacccggcgaagauggaacacucauaugccgugccaacggcaaccccaaaccccgcaucagcuggcuaaccaacggcguaccaaucgaaauagccccggacgaccccagucgcaaaauagacggcgacacaaucauauucagcaacguacaagaacgauccuccgccgucuaccaauguaacgcaucaaaugaauauggguaccugcuugccaacgcuuucguuaacguccuagcugaaccacccaggauacucaccccagccaacacgcucuaccaagucauagccaaccgcccagcccuccuggauugcgcguucuucggcucgccacugccaacaauagaaugguucaaaggugcuaagggcucagcccuccacgaggacaucuacgucuuacacgagaacggaacuuuagaaauucccguagcccaaaaagacucuacaggaaccuacacaugcguagccagaaacaaauuaggcauggccaaaaaugaggugcaccuggaaauaaaggaccccaccuggaucguaaagcaaccagaauacgccgucguucaaagggguucaauggucagcuucgaauguaaagucaaacacgaucacacauuaagccuaacaguccuauggcuaaaggacaacagagaacugccuuccgacgaacgcuucaccguggacaaagaccaucuugucgucgccgacgucucugacgaugacucuggcacauacaccugugucgcaaacaccacccuagacuccguuagugcaagcgcgguccucucaguagucgcaccaaccccuacccccgcaccagucuacgacguacccaacccaccauucgauuuagaacuaaccgaucagcucgacaaauccguccaacucucauggacacccggcgacgauaacaacucacccaucaccaaguucauuaucgaauacgaagacgccaugcacaaacccgggcucuggcaccaccagacagaaguauccggaacgcaaacaaccgcucaauuaaaacuaucaccauacgucaauuacucauucagaguaauggcggucaacagcauugggaaaagccucccgagcgaagccucggagcaauaccucaccaaggcuucagagccagauaaaaaccccaccgcggucgaaggacucggcucggaaccagacaaccuugugaucaccuggaaaccccucaacggauucgagucaaacggaccaggucuccaguacaaagucagcuggagacagaaagauggggacgacgaauggaccucagucgucgucgcuaacgucucuaaauacaucgugucagguacccccacauuuguacccuaucuuauuaaaguacaagcacugaacgacaugggcuuugcaccagaacccgcagucgucaugggacacucaggcgaagaucucccaaugguagcuccuggcaacguuagaguuaacgugguaaacucuacgcuagcugaaguccacugggauccagugccccucaaaagcauccgcggucaccuccaaggguaucgaaucuacuacuggaaaacacagucaagcucgaaacgcaacagaaggcacauagagaaaaagauccucacauuccaaggcucaaaaacccacggcaugcuucccggacucgaaccuuuuucacacuacacccucaacguacgggucgucaacggaaagggggaaggcccugcaagucccgaucgcgucuuuaacacccccgaagggguccccucagcuccaucgagccuaaaaauugucaaccccacacuagacagccuuacucucgaaugggacccaccgucacaucccaacggcauccuaaccgaauauacccucaaauaucagccaauuaacucaacacacgaguuaggcccccuaguugaccugaagauacccgccaacaagacacguuggaccuuaaagaaccugaauuuuucaacaagauacaaauucuacuuuuacgcccaaaccuccgcgggaucagggagccagaucaccgaagaagccguaaccacagucgaugaggcaggaauacucccuccagacgucggggccggaaaaguccaagcagucaacccacgaauaucgaaccuuaccgccgccgccgccgaaacauacgcuaacauuuccugggaguaugaagguccagaacacgucaacuucuacgucgaauacggcguugccgguucaaaagaggaauggcgaaaggaaauagucaacggauccagaaguuucuucggccucaaaggccucaugccaggaaccgcuuacaaaguccgugucggggcaguuggcgacagcggguuuguguccuccgaagacguauucgaaaccggcccagccauggcaagccgccaagucgauaucgcuacacaaggcugguucauaggacuuaugugcgccguagcccuucucauccuaauacuccucauagugugcuuuauccgaagaaacaaagggggcaaauacccagucaaagaaaaagaggaugcccacgccgacccagagauccaacccaugaaggaagacgacgguaccuucggggaauacuccgaugcagaagaccacaaaccacucaagaaaggaucucgaacaccgucagaccgcaccguaaagaaagaagacuccgacgacagccuagucgacuacggugaaggagucaacggccaauuuaacgaagacggcucauucaucggccaauacucuggcaagaaagaaaaagaaccagccgaaggaaaugaaucaucugaagccccaucacccgucaacgccaugaacuccuucgucuag

SEQ ID NO: 4399 - RNA, 1305 nt, Artificial Sequence
  AAB51320 variant
augucaaucgagaaaauaugggcgcgcgaaauccuggacucgcgcggaaacccaacgguggaaguggaccuguacacggccaagggcuuguucagggcagcaguacccagcggggccucgaccggaaucuacgaagcgcuggaacuacgagacggggacaaacaaagguaccugggcaagggcgugcuaaaagccguagaccacaucaacagcacgaucgcgcccgcgcucauaaguucgggcuuaagcguggucgagcaagaaaaguuagacaaccucaugcucgagcuagacggaacggaaaacaaaucgaaauucggggcaaacgcaaucuugggcgugagucuggccgugugcaaggccggcgccgcggaacgagaacugccauuguacagacauauagcccagcucgccggaaacagcgaccucauacucccgguaccggccuucaacguaauuaacggcgggagccacgccgggaacaagcuagcgaugcaggaguucaugauacugccgguaggggccgagagcuuccgcgacgcaaugcgacugggcgcggaaguauaccacacccuaaaaggggucauaaaagacaaauacggcaaggacgcaacaaacgucggggacgaaggcggguucgcgcccaauaucuuagaaaacagcgaggcccuggaacuggucaaggaagcaauugacaaagccggcuacaccgagaaaauaguaauaggcauggacguggccgcaagcgaguucuaccgcgacggcaaauacgaccuagauuucaagagcccgaccgaccccucgcgcuacaucacaggcgaccaacugggcgcgcucuaccaagacuucguacgcgauuacccagucguaagcauagaagacccauucgaccaagacgacugggcagccuggagcaaauucacggccaacgucggaauccaaauaguaggcgacgaccugaccguaacaaaucccaaacgcaucgaacgggccguagaagaaaaagcaugcaauugccugcuccugaaagugaaccaaaucggaagugugaccgaagccauacaagcgugcaaauuagcacaagagaacggguggggaguaauggucucgcacagaagcggggaaacggaagacaccuucaucgcagaccuagucgugggccucugcacaggccaaauaaagaccggggccccaugcaggagcgaacgccuggccaaguacaaucaacuaaugagaaucgaggaagaacucggggacgaagccagguucgcgggccacaacuuccgcaacccaucgguccuauga

SEQ ID NO: 4400 - RNA, 1395 nt, Artificial Sequence
  AAH08489 variant
auggaaacccucagcuucccccgcuacaacguagccgaaauagucauccacauccgcaacaaaauccuaaccggcgccgacggcaaaaaccucacgaaaaacgaccucuaccccaaccccaaaccggaaguccuacacaugaucuacaugcgcgcccuccaaauagucuacggcauccgccuagaacacuucuacaugaugccagucaacagcgaagucauguacccucaccucauggaaggcuuccucccguucagcaaccuagucacacaccuagacagcuuccuuccaauaugcagaguaaacgacuucgaaaccgccgacauccucugccccaaagccaaacgcaccucacguuuccucagcggcauaauaaacuucauacacuucagagaagcaugccgagaaaccuacauggaauuucuauggcaauacaaaagcucagccgacaaaaugcaacaacucaacgcagcgcaccaggaagcccucaugaagcuagaacgacucgacucaguccccguagaagaacaagaagaguucaaacaacuauccgacgggauccaagaacuccaacaaagccucaaccaagacuuccaccagaaaacaaucguacuacaagaaggaaacagccaaaagaaaucaaacauauccgaaaagacaaaacgccuaaacgaacucaaacuuuccgucguaucccucaaagaaauacaagaaucccucaaaaccaaaaucgucgacucccccgaaaaacuaaagaacuacaaagagaaaaugaaagacaccguacaaaaacucaaaaacgcacgccaagaaguaguagagaaauacgaaaucuacggcgacagcgucgacugccuacccuccugccaacucgagguccaacucuaccaaaagaaaauccaagaccucuccgacaacagagaaaaacucgccucaauccuaaaagaaucccucaaccuagaagaccaaaucgaauccgacgaaucggaacucaagaaacugaaaaccgaagaaaacagcuucaaacgccucaugauaguaaagaaagaaaaacucgccaccgcacaauucaaaaucaacaagaaacacgaagacgucaaacaauacaaacgcaccguaaucgaagacugcaacaaaguccaagagaaaagaggcgccgucuacgaacgcguaaccaccauaaaccaagaaauccagaaaaucaaacugggaauccaacaacucaaagacgccgcggaacgcgaaaaacucaaaagccaagaaaucuuccucaaccugaaaaccgcccuagaaaaguaccacgacggcaucgaaaaagccgccgaagacagcuacgcaaaaaucgacgagaaaacagcagaacuaaaacgcaagauguucaaaauguccaccuaa

SEQ ID NO: 4401 - RNA, 543 nt, Artificial Sequence
  AAB49693 variant
augcaagcagaagggcgcgggaccgggggcucgaccggggacgcggacgggccagggggcccgggcauacccgauggcccgggcgggaacgcgggcgggcccggggaagcgggcgcgaccgggggcaggggcccgagaggggccggggccgcgcgcgcgagcggacccgggggcggggccccgcgagggccccauggcggggccgcgagcgggcucaauggcugcuguaggugcggggccaggggcccggaaucacgauugcuagaguucuaucucgcgaugccguucgcgacaccgauggaggcagagcuagcacgcaggagcuuggcccaggacgcacccccgcuaccggucccgggcgugcucuuaaaagaguucacgguaucgggcaauaucuugaccauacgauuaaccgcggccgaucacaggcaauuacaacugagcauaagcucgugccugcaacaacugucgcuauugauguggaucacgcaaugcuucuugcccguguucuuagcacagcccccgagcggacaaaggcgauag

SEQ ID NO: 4402 - RNA, 1215 nt, Artificial Sequence
  CCDS14134.2 variant
auggccuccccccgccucggcacuuuuugcugccccacacgagaugccgccacccaacuuguacuaucauuccaaccccgugcauuccacgcccuaugccucggcucaggaggccuccgccuugcccucggccuccuacaacuccuccccggccgucgcccagccggacccggauccccagccaccucaccccccgccuccguccgcauccuucgagcagccgccgccugcgaccuccuugguugccuuggcauggucauccgcuccaccguguggcucggcuuccccaacuuugucgacucagucuccgacaugaaccacaccgaaaucuggcccgccgccuucugcgucggcuccgccauguggauccaacuacucuacuccgccugcuucugguggcuauucugcuaugccgucgacgccuaccucguaauacgccguucagccggccuauccaccauccuccucuaucacaucauggcauggggccucgccacccuccucugcgucgaaggugcagccaugcucuacuaccccuccgucucccgcugcgaacgcggccucgaucacgccaucccccauuacguaaccauguaccucccacuccuccuaguccucguagccaacccaauccuauuccaaaaaaccgucacagcagucgcaucccucuuaaaaggucgacaaggcaucuacacagaaaacgaacgccgaaugggcgccguaaucaaaauccgcuucuucaaaaucaugcuaguacucaucaucugcuggcucucaaacauuaucaacgaaucacuccuauucuaccuagaaaugcaaaccgacaucaacggcggcuccuuaaaacccgucagaaccgcagccaaaacuaccugguucaucaugggcauacucaaccccgcacaaggcuucuuacucucucucgcuuucuacggcuggaccggcugcucucucggcuuccaaucaccacgcaaagaaauccaaugggaaucccuaaccacauccgccgccgaaggcgcccacccaucgccccuaaugccccacgaaaaccccgccuccggcaaagucucucaagucgguggccaaaccagcgacgaagcccucuccaugcuauccgaaggcuccgacgcauccacaaucgaaauccacacagccagcgaauccugcaacaaaaacgaaggagaccccgcacuccccacccacggcgaccucuaa

SEQ ID NO: 4403 - RNA, 3141 nt, Artificial Sequence
  AAH38180 variant
auggccucaagcguagggaacguugcugacucaaccgaacccacaaaacgcaugcuaucauuccaaggacucgccgaauuagcccaccgagaauaccaagcaggcgacuucgaagcagccgagcgacacugcaugcaacuuuggcgccaagaacccgacaacacgggcguccuccugcugcucagcucaauacacuuccaaugcaggcgccucgaccgauccgcacauuucuccacauuagcaauuaaacaaaacccgcuacucgcagaggccuacucgaaccuaggaaacguauacaaagaacgcgggcaacugcaagaagcaauagaacacuaccgccacgcgcuacgacuaaaaccagacuucauagaugguuacaucaaccucgccgcagcccuagucgcagccggugacauggaaggagcaguccaggcauacgucuccgcccuccaauacaaccccgacuuauacugcguccgcuccgaccucggcaaccuucuaaaagcccuuggacgucuagaggaagcaaaggcuugcuaccucaaagccauugaaacccagcccaacuucgccguagccugguccaaccucggaugcgucuuuaacgcacagggcgaaauauggcucgcaauacaucauuuugagaaagcaguaacacucgauccgaacuuccuggacgcuuacauaaaucuaggcaacguccucaaagaagcccgaaucuuugauagggccgucgcagcguaccuacgcgcacucagccuuagccccaaccacgcgguuguccacggcaaucuugccugcgucuacuaugagcaaggacucauagaccuagcgauagacaccuaccgccgagcuaucgaauuacagccucacuuuccagaugccuacuguaaccucgcuaacgcccucaaagaaaaaggcuccguagccgaagccgaggacuguuacaauaccgcucuacgccuaugcccaacacacgcggacucccuuaauaaccuagccaacauaaaacgagaacaaggcaauauagaagaggccgucaggcucuaccgcaaagcgcuagaaguauucccggaguucgcagccgcgcacuccaaccucgcaagcguccuccaacaacaaggaaaacuccaagaggcccugaugcacuacaaagaagccauucgcauuucccccacguuugccgacgcguacucgaacaugggcaacacccuuaaagagaugcaagacguacagggcgcccuacaaugcuauacccgagccauccaaauuaaccccgcauucgcagacgcacacuccaaccuggccucgauccacaaagauuccggaaacauacccgaagcaaucgcauccuaccgaaccgcccucaaacugaagccagacuuccccgacgcguauugcaaucuagcccacugccuacagaucgucugcgacuggacugacuacgacgaaagaaugaagaaacuggucucgaucguagccgaccagcuggagaaaaacaggcuaccaucagugcacccccaccacagcaugcuguacccccucagccauggcuuccguaaagccauagccgaacgccacggaaaccucugucuggauaaaauaaaugucuuacauaaaccgcccuacgaacaccccaaagauuuaaaacucucugacggccgacuaagaguaggcuaugucuccuccgacuucggcaaccaccccaccucacauuuaaugcaauccauccccggcaugcacaaccccgacaaauucgaagucuucugcuacgcccuaucaccagaugacggcaccaacuuccgcgucaaagucauggccgaagcaaaccacuucauagaccuuucgcaaauaccaugcaacggcaaagcugcggaccguauacaucaagacggaauacacauauuaguaaacaugaacggauacaccaaaggcgcccgcaacgaacuuuuugcccuucgacccgcacccauacaagcaauguggcuaggcuacccaggcacauccggcgcucuauucauggacuacauaauaacggaccaagaaacaucaccagccgagguagcagagcaguacagcgaaaaacuagcauauaugccccacacauucuucaucggagaccacgccaacauguuuccccaccuaaagaagaaagcggucaucgacuucaaaucaaacggccacaucuacgacaaucgaaucguccuaaacggaauagaccucaaagccuuuuuagacucccuccccgaugucaaaaucgucaaaaugaaaugccccgacggcggagacaaugcagacuccagcaacacagcccucaacaugccagucauaccaaugaauacgaucgccgaagcgguuaucgaaaugaucaaucgcggucaaauccaaaucaccauaaauggauucucaaucucuaauggccuagccaccacccaaauaaauaacaaagccgccacaggcgaggaaguaccccggaccaucaucgugaccacacgaagccaguacggccuuccggaggacgccaucguauacugcaacuucaaccaacucuacaaaauagauccaagcacccuacaaaugugggcaaauauccucaaacgcguucccaauucaguccuuuggcuccugcgauuucccgcugugggcgaaccuaacauucagcaauacgcccaaaacaugggccucccccaaaaccggaucauauucucaccaguagcgccaaaagaagaacacguccgaagaggucaacucgccgacgucugccucgacacaccacuauguaacggucacaccacaggaauggacguacugugggcaggcacaccaauggucacaaugcccggugaaaccuuagcaagucgcgucgcugccucccaacucacaugucucggaugccucgagcucauagccaaaaaccgccaagaauaugaggacauagcaguaaaacucggcaccgaccuugaauaccugaagaaagucagagguaaagucuggaaacaacgaaucaguagcccccucuucaacacaaaacaguauaccauggaacuugaacgccuauacuuacagaugugggaacacuacgccgccggaaauaaaccggaccacaugaucaaaccgguagaggucacggaauccgccuaa

SEQ ID NO: 4404 - RNA, 441 nt, Artificial Sequence
  BAG57972 variant
auggccgccgaaacccuccucuccucccuccucggccuccuccuccucggccuccuacuccccgccucccucaccggaggcgucggcucccuaaaccucgaagaacucuccgaaaugcgcuacggcaucgaaauccucccccuccccgucaugggcggccaaucccaauccucagacgucgucaucgucuccuccaaauacaaacaacgcuacgaaugccgccuccccgucggcgccauccacuuccaacgcgaacgagaagaagaaacccccgccuaccaaggccccggaauccccgaacuccucucccccaugcgcgacgcccccugccuccucaagaccaaagacugguggaccuacgaauucugcuacggccgccacauccaacaauaccacauggaagacuccgaaaucaaaggccuccaagccgccuccuccuaa

SEQ ID NO: 4405 - RNA, 1221 nt, Artificial Sequence
  BAG65333 variant
auggcagcggaaacgcuccugagcucgcuccugggccuacuccugcuagggcucuuacucccggccucgcucacgggcggagucgggagccucaaccuagaagaacugucggaaaugcgcuacggcauagagauacucccgcuaccggucaugggcgggcaaucacaaucaagcgacgucguaaucguaagcucgaaauauaaacagcgcuacgaaugucgcuugccagcgggcgcgauccacuuccaacgcgagcgagaagaagagacuccggccuaccaagggcccgggaucccggaauugcucucacccaugcgcgacgccccaugccuacucaaaacaaaagacugguggacguacgaguucuguuacgggcgccacauccagcaauaucacauggaagacagcgcaagcggggccccgaacgacuuccagaacaacguccaagucaaagucauaagaucgcccgcggaccugaucagauucauagaagaacuaaagggagggaccaagaaaggaaaaccgaacauaggacaggaacagcccguggacgacgcggcggaaguaccacagcgagagcccgagaaggaacgaggggacccggaacggcaacgagaaauggaagaggaagaggacgaggacgaagacgaggacgaagacgaggacgagcgccaacuccugggagaguucgagaaagagcucgagggaauacuccugcccucagacagggaccggcucagaagcgagguaaaggcagggauggagcgcgagcucgaaaacauaauccaggaaacggaaaaagaacuggacccagacggacucaagaaagagagcgagcgagaccgcgcaaugcuggcccuaacaucgacacuaaacaagcuaauaaaaaggcuagaggaaaagcaaucgcccgaacucgugaaaaagcacaagaaaaagcgcgugguacccaaaaagccaccaccaucaccccagcccacgggcaagaucgagaucaaaauagugcgcccgugggcggaagggaccgaagaaggggccagguggcugaccgacgaagauaccaggaaccuaaaagagaucuucuucaacaucuuggucccgggcgcagaagaggcccagaaagagcgccagagacagaaagagcuagaaagcaacuacaggagagugugggggagucccggaggagaagggaccggggaccuggacgaguucgacuucuag

SEQ ID NO: 4406 - RNA, 2223 nt, Artificial Sequence
  BAH13933 variant
auggcgguggaaacccugcuaagcucacuacucggccugcugcucuuaggucuacuacuaccggcaagccucaccggaggagucggcagccucaacuuagaagaacugucagaaaugagauacggcauagaaauccucccccuaccggucaugggaggccaaucccaaucaagcgacguagucaucgucagcagcaaauacaaacaacgcuacgaaugccgcuuacccgcaggagcaauccacuuccaacgagagcgggaggaagaaacacccgcauaccaaggccccggaauaccggaacuauuaagcccaaugcgcgacgcacccugccuccuaaaaacaaaagacugguggacauacgaguucugcuacggaagacacauacagcaguaucacauggaagacagcgaaaucaaaggagaaguccucuaccucggauacuaccaaagugcauucgauugggacgacgaaacagcaaaagccucgaaacaacacagacucaaacgguaccacagccaaacguacggcaacggcucaaaaugcgaccuaaacggucgaccaagagaagcagagguccgcuuccucugcgacgaaggagcgggcaucuccggggacuacauagacaggguagacgaaccgcuaucaugcagcuacguccucaccauaagaaccccgcgccucugcccgcacccccuccuacggcccccaccaucagccgccccacaagccauacuaugccaccccagccuacaaccagaagaauacauggcauacgugcaacgccaagcagacagcaaacaauacggcgacaaaaucauagaggaauuacaagaccucggaccccaagucuggucagaaacaaaaagcggaguagccccacaaaagauggccggccgaacccuguuccaccuauuccgagaaauacacuuccacuucuuccccagccccgaccugaccgugcuaacagacugguggggagggggaggcguggaaaaauaccacgguccaagcucauuaggcgaucgcggaggcgaagggaccccauccuaccugcuaccguccgucucaccacuucucucagaccagagccuacccgugcucugcacacuaggcgccagccccacaaaagacgacagcaaagacucggacuucuggaaaaugcuuaacgaaccagaagaccaggcccccggaggagaagaagucccugcagaagaacaagaccccagcccagaagccgccgacucagcgucuggagccccuaacgacuuccaaaacaacguucagguaaaaguaauccgcucacccgccgaccuaauacgcuucauagaagaacucaaaggaggaacaaagaaaggaaaacccaacaucggccaagaacaaccaguagacgacgccgcagaagucccacaacgagaacccgaaaaggaacgaggcgaccccgaacgccaacgcgaaauggaagaagaagaagacgaagacgaagacgaagacgaagacgaggacgaacgccaauuacugggggaguucgaaaaagaacuagaaggaauacuccuaccaagcgaccgcgaccgcuuaaggagcgaagucaaggcgggcauggagagagaacucgaaaacaucauacaagagacggagaaggaacuagacccagacggccuuaagaaagaaagugaaagagaccgcgcaaugcuagcgcuaaccagcacccuaaacaaauuaauaaaacgccucgaagaaaaacaaagcccagagcucgucaagaaacacaaaaagaaaagaguaguaccaaagaaaccacccccaucaccccagccaacagaagaagaucccgaacauagaguccgcguacgagucacgaaauuacgcuuaggaggcccaaaccaagaccugacagugcucgaaaugaaaagagaaaacccgcaacucaaacagauagaagggcuaguaaaagaacuccuagagcgagaggggcuaacugccgccggcaaaauugaaaucaaaaucguacgaccaugggccgaaggcacagaagagggcgccagauggcuaacagacgaggacaccagaaaccuaaaagagauauucuucaacauacucgucccaggcgcagaagaggcacaaaaagaacgccaacgacagaaagagcuugaaucgaacuaccgccgaguguggggaagccccgggggagagggaacaggcgaccuagacgaguucgacuucuaa

SEQ ID NO: 4407 - RNA, 2004 nt, Artificial Sequence
  AAB06495 variant
auggcagcggaaacacuacuaagcucgcugcucggccuacucuuacucggacugcuacucccagccagccugacuggaggagucggaagucucaaccuggaagaacuauccgaaaugcgcuacggaauagaaauacucccgcuaccagucaugggaggacaaucgcaaucaagcgacguaguaauaguauccucaaaauacaaacaacgcuacgaaugccgccugccggcaggcgcgauccacuuccagcgcgaacgcgaggaggagaccccggcauaccaagggccagggaucccggaauugcucucaccaaugcgagacgcacccugccugcucaaaaccaaagacugguggacguacgaauuuuguuacggcagacauauacagcaauaccacauggaagacagcgaaaucaagggcgaaguuuuauaucuaggcuauuaccaauccgcguucgacugggaugacgaaacagcaaaagcaagcaaacaacaucgacuaaaaagguaccacagccaaaccuacggcaacggcuccaaaugcgaccugaauggacgaccacgcgaagccgaagucagguuccuaugcgacgaaggagccgggauaucgggcgacuacauagaccgagucgacgaaccccuaucaugcucauacgugcuaacgauccgaacuccgcgacucugcccacacccucuccugcgcccgcccccgagugcggcaccacaagcgauacucugccaccccucacuccagccagaagaguauauggcguauguacaaaggcaagcagacucaaaacaguacggcgacaagaucaucgaggaacuccaagaccuaggcccgcaaguauggagcgaaacaaaaucgggcguggcaccgcaaaagauggcgggcgcgagcccgaccaaagacgacagcaaagacagcgacuucuggaagaugcugaacgagcccgaggaccaggcaccaggcggggaagaggucccggccgaggaacaagacccgaguccagaggcggccgacagcgcaagcggagccccgaacgauuuccaaaacaacguccaagucaaagucauacguucgcccgcggaccuaauccgguucaucgaggaacucaagggaggcaccaagaaagggaaaccaaacauaggccaagaacaacccguggacgacgccgcagaagugccccagagagaaccagaaaaagaaagaggagacccagaaagacaaagggaaauggaggaagaagaggaugaagacgaggacgaggacgaggacgaagacgagcgccaacucuuaggcgaguucgaaaaagaacucgaaggcauacuacuucccagcgacagagacaggcucagaagcgaaguaaaagcggggauggaacgggaacucgaaaacauaauccaggaaacagaaaaagaacuagauccggacgggcucaagaaagagagcgaacgcgaucgcgcgaugcuggcccuuaccagcacacugaacaaacucaucaaacgacucgaggaaaaacaaucgccagaacucgucaagaaacacaaaaagaaacgcguagucccaaagaaaccaccgcccucaccccaacccacggaagaagauccggaacaccgcguccgcgugcgcgugaccaaacuccgccuagguggcccaaaccaagaccugaccguacucgaaaugaaacgagagaacccgcagcugaaacagaucgaaggccuaguaaaagaacugcucgagagagaaggccuaacggcagccggaaaaaucgaaauaaaaaucguaaggcccugggccgagggcacggaagagggcgcacgauggcuaacggacgaggacacacgcaaccugaaggaaaucuucuuuaacauccuagugcccggcgcggaggaagcacaaaaggaaagacaaagacaaaaggagcuagaaucaaacuaucgcagaguuuggggcucacccgggggagaaggcacgggcgaccucgacgaguucgacuucuaa

SEQ ID NO: 4408 - RNA, 303 nt, Artificial Sequence
  AAI13433 variant
augcgcgcgcucacgcucuuggccuugcucgcgcucgcggccuugugcauagccgggcaagcgggcgcgaaaccgagcggggccgagagcucgaaaggggccgcguucgugagcaagcaagagggcucggaaguggucaagcgcccgcgcagguacuuguaccagugguugggcgcgcccgugcccuaucccgauccccuggaaccgcgcagggaagugugcgagcucaaucccgauugcgaugaauuggccgaucacauaggcuuucaagaggccuaucgcagguucuauggcccggucuag

SEQ ID NO: 4409 - RNA, 945 nt, Artificial Sequence
  EAX06008 variant
augcgcauagccguaaucugcuucugucuccuaggaauaaccugcgccaucccagucaaacaagcagacucaggcagcuccgaagaaaaacaacuauacaacaaauacccagacgcaguagccacauggcuuaacccugacccaucccaaaaacaaaaccuacucgccccacaaaacgcagucuccuccgaagaaaccaacgacuucaaacaagaaacacuccccagcaaaagcaacgaaucucaugaccacauggacgacauggacgacgaagacgacgacgaccacguagacucacaagacagcauagacucaaacgacuccgacgacgucgacgacacagacgacucccaccaaucagacgaaucccaccacuccgacgaauccgacgaacucgucaccgacuuccccacagaccuaccagcaaccgaagucuucacccccgucgucccaaccgucgacaccuacgacggccgaggcgacagcgucguauacggccuacgcagcaaaucaaaaaaauuccgacgccccgacauacaauaccccgacgcaacagaugaagacauaaccucccacauggaauccgaagaacucaacggcgccuacaaagccauccccguagcccaagaccucaacgcccccucagacugggacucacguggaaaagacuccuacgaaaccagccaacucgacgaccaaagcgcagaaacacacagccacaaacaaucacgccucuacaaacgcaaagccaacgacgaaucaaacgaacacuccgacgucaucgacucccaagaacucucaaaagucucccgcgaauuccacagccacgaauuccacucccacgaagacaugcucgucgucgaccccaaauccaaagaagaagacaaacaccucaaauuccgaaucucacacgaacuagacuccgccucaucagaagucaacuaa

SEQ ID NO: 4410 - RNA, 903 nt, Artificial Sequence
  EAX06009 variant
augcgaauagccgucaucuguuucugccuccuaggcaucacaugcgcaauccccguaaaacaagccgacucaggcuccucagaagaaaaacaacuauacaacaaauaucccgacgccgucgccaccuggcucaacccagaccccucacaaaaacaaaaccuccuagccccccaaacccuccccucaaaauccaacgaaucacacgaccacauggacgacauggacgacgaagacgacgaugaccacgucgacagccaagauuccaucgacuccaacgacuccgacgaugucgacgacaccgacgacucccaccaauccgacgagagucaccacuccgacgaauccgacgaacucgucaccgacuuccccaccgaccuccccgccaccgaagucuucacccccguaguccccaccgucgacaccuacgacggccgcggcgacuccgucguuuacggucuccgauccaaaucaaaaaaauucagacgccccgacauccaauaccccgacgccaccgacgaagacaucaccucccacauggaaucagaagaacucaacggcgcauacaaagccauccccgucgcacaagaccucaacgcccccuccgacugggacucccgcggcaaagauuccuacgaaacaucccaacucgacgaccaaagcgcugaaacccacucacacaaacaaucccgccuauacaaacgcaaagccaacgacgaaucaaacgaacacucagacgucaucgacucgcaagaacucuccaaagucucccgcgaauuccacucccacgaauuccacucacacgaagacaugcuagucgucgaccccaaaucaaaagaagaagacaaacaccuaaaauuccgcaucucccacgaacucgacucagccuccuccgaagucaacuaa

SEQ ID NO: 4411 - RNA, 864 nt, Artificial Sequence
  EAX06010 variant
augcgcaucgcagucaucugcuucugccuccucggaauaaccugcgcaauacccgucaagcaagccgacucaggcuccagcgaagaaaagcaaaacgccgucucaucagaagaaaccaacgacuucaaacaagaaacacuccccagcaaauccaacgaaucucacgaccacauggacgacauggacgacgaagacgacgacgaccacgucgacucccaagacagcaucgacagcaacgacagcgacgacgucgacgacacagacgacucacaccaaagcgacgaaagccaccacuccgacgaauccgacgaacucgucaccgacuuccccaccgaccuccccgccaccgaagucuucacacccguaguccccacagucgacaccuacgacggccgaggagacuccguggucuacggccuccgauccaaauccaaaaaauuccgacgccccgacauccaauaccccgacgcaacagacgaagacauaaccucccacauggaaucagaagaacuaaacggcgccuacaaagccaucccaguagcccaggaccuaaacgcccccucagacugggacucccgaggcaaagacuccuacgaaacaagccaacucgacgaccaauccgcagaaacccacucgcacaaacaaucccgccucuacaaacgcaaagccaacgacgaaagcaacgaacacagcgacgucaucgacagccaagaacucucaaaagucagccgcgaauuccacucccacgaauuccacagccacgaagacaugcucguagucgaccccaaauccaaagaagaagacaaacaccucaaauuccgcauaucacacgaacucgacagcgcgucauccgaaguaaacuaa

SEQ ID NO: 4412 - RNA, 984 nt, Artificial Sequence
  BAH12087 variant
augggaaucgucccccgaagccuggacaaaaaagcccaccgcguacaauuccaacucaaccgcaucaaagccaaaaucgaacuacccuggggcucacuccaacuagacugccugaugaagacacuaaaagaacucuacaacaaauaccccgacgccgucgccaccuggcucaaccccgaccccucacaaaaacaaaaccuccuagccccacaaaacgccguauccuccgaagaaaccaacgacuucaaacaagaaacacuccccuccaaauccaacgaaucacacgaccacauggacgacauggacgacgaagacgacgacgaccacgucgacucccaagacagcauagacuccaacgacuccgacgacgucgacgacaccgacgacucucaccaauccgacgaaucccaccacagcgacgaaucagacgaacucguaaccgauuuccccaccgaccuccccgccaccgaaguauucacccccgucguaccaaccgucgacacauacgacggccgaggcgacagcguagucuacggccuacgcuccaaauccaaaaaauuccggcgcccagacauccaauacccagacgccaccgacgaagacaucaccucgcacauggaauccgaagaacucaacggcgccuacaaagccauacccguagcccaggaccucaacgcccccuccgacugggacucacgcggcaaagacuccuacgaaaccucccaacucgacgaccaaucagcagaaacccacucacacaaacaaucacgccuguacaaacgcaaagcaaacgacgaaagcaacgaacacucagacguaaucgacucacaagaacucuccaaagucuccagagaauuccacucccacgaauuccacagccacgaagacaugcucgucgucgaccccaaauccaaagaagaagacaaacaccucaaauuccgcauaucccacgagcuagacagcgccuccuccgaaguaaacuaa

SEQ ID NO: 4413 - RNA, 879 nt, Artificial Sequence
  AEA49030 variant
augcgaauagccgucaucugcuucugccuacucggcaucacaugcgcaauacccgucaaacaagccgacuccggcuccuccgaagaaaaacaacucuacaacaaauaccccgacgccguagccaccuggcucaaccccgaccccagccaaaaacaaaaccuccucgcaccccaaaacgccgucaguuccgaagaaaccaacgacuucaaacaagaaacacuccccucaaaauccaacgaaucccacgaccacauggacgacauggacgacgaagacgacgacucucaccaauccgacgaaucacaccacuccgacgaauccgacgaacucguaaccgacuuccccaccgaccucccagccaccgaagucuucacccccgucguacccacaguugacaccuacgacggcagaggagacucuguagucuacggacuccgaagcaaauccaaaaaguuccgccgcccagauauccaauaccccgacgccacagacgaagacaucaccucccacauggaauccgaagaacucaacggcgccuauaaagccauccccgucgcccaagaccucaacgcccccuccgacugggacucacgcggcaaagacucuuacgaaaccucgcaacuagacgaccaaagcgccgaaacccacucccacaaacaaucccgccuauacaaaagaaaagccaacgacgagagcaacgaacacagcgacgucaucgacucacaagaacuuagcaaagucucccgagaauuccauucacacgaauuccacucccacgaagacaugcucgucgucgaccccaaauccaaagaagaagacaaacaccucaaauuccgcaucucccacgaacucgacagcgccuccucagaagucaacuaa

SEQ ID NO: 4414 - RNA, 945 nt, Artificial Sequence
  AAA86886 variant
augcgcaucgcaguaaucugcuucugccuccucggcauaaccugcgcaauccccgucaaacaagcagacagcggcucaagcgaagaaaaacaacuauacaacaaauaccccgacgccguagcaaccuggcucaaccccgaccccagccaaaaacaaaaccuacucgccccacaaaacgcagucucauccgaagaaaccaacgacuucaaacaggaaacccuccccagcaaaucaaacgaaucccacgaccacauggacgacauggacgacgaagacgacgacgaccacgucgacucccaagacuccaucgacucuaacgacagcgacgacgucgacgacaccgacgacucccaccaaagcgacgaaucccaccacucagacgaauccgacgagcuagucacagacuucccaaccgaucuacccgccaccgaagucuucaccccaguaguccccaccgucgacacauacgacggccgcggcgacucagucgucuacggccucagaucaaaaucaaaaaaauuccgcagacccgacauccaauaccccgacgccaccgacgaagacauaacaucccacauggaaucagaagaacucaauggggccuacaaagcaauccccguagcacaagaccucaacgccccauccgacugggacucccgcggcaaagauuccuacgaaaccucccaacuagacgaccaauccgccgaaacucacucccacaaacaaucccgccucuauaagcgcaaagccaacgacgaaucaaacgaacacuccgacguaauugacagccaagaacucuccaaagucucccgcgaauuccacucacacgaauuccacucccacgaagacaugcuuguagucgaccccaaauccaaagaagaagacaaacaccuuaaauuccgcaucucccacgaacucgacuccgccuccuccgaaguaaacuaa

SEQ ID NO: 4415 - RNA, 1182 nt, Artificial Sequence
  AAA59988 variant
auggaagagccacaauccgacccuucuguagaaccuccccucucccaagaaacauucucagaccucuggaaacuucucccagaaaacaacguccucuccccucuccccucccaagcaauggacgaccucaugcucucacccgacgacaucgaacaaugguucaccgaggaccccggacccgacgaagccccacguaugcccgaagccgccccccccgucgccccagcccccgccgcucccacacccgcagcccccgcccccgcacccuccuggccccuauccuccuccguucccucccaaaaaaccuaccaaggcuccuacggcuuccgccuaggcuuccuccacuccggaacagcaaaauccgucaccugcacauauucacccgcuuuaaacaaaauguucugccaacucgccaaaaccugcccaguacaacucugggucgacuccacccccccaccgggaacccgcguacgcgcaauggcuaucuacaaacaaucacaacacaugaccgaagucguaagaaggugcccccaccacgaacgaugcucagacucagacggccucgcccccccacaacaccucauccgcgucgaaggaaaccuccgcguagaauaccucgacgaccgcaacacuuuccgccacucagucguaguucccuacgaacccccugaagucggcuccgauugcaccacaauccacuacaacuacaugugcaacuccuccugcaugggcggcaugaaccgccgaccaauccuaaccaucaucacacucgaagacuccuccggcaaucuccuagggcgaaacuccuucgaagucagaguuugcgccugccccggccgagaccgccggaccgaagaagaaaaccuccgcaaaaaaggugaaccccaccacgaauuaccccccggcucaaccaaacgugcccuccccaacaacaccucaagcucaccccaacccaaaaaaaaaccacuagacggcgaauacuucacccuccaaauccgaggacgcgagcgcuucgaaauguuccgagaacucaacgaagcccucgaacuaaaagacgcccaagccggcaaagaacccggaggaucccgggcucacuccucccaccuaaaaucgaaaaagggccaauccacaucccgacacaaaaaacucauguucaaaacagaaggaccagacuccgacuaa

SEQ ID NO: 4416 - RNA, 309 nt, Artificial Sequence
  AAF88037 variant
augagcgcgcgcgugcgcucgcgcucgcgagggcgcggggacggacaagaggccccggacguggucgcguucguggccccgggcgagagccagcaagaggaaccgcccacggacaaucaagauaucgagcccgggcaagagcgcgagggcacgcccccgaucgaggaaaggaaaguggaaggggacugucaagagauggaucucgagaaaacgcgcucggaaaggggcgauggcucggacgugaaagagaaaacgcccccgaacccgaaacaugccaagaccaaggaagcgggcgauggccagcccuag

SEQ ID NO: 4417 - RNA, 1209 nt, Artificial Sequence
  AAA60003 variant
augcaaauguccccagcccuuacuugucuaguucucggccucgcacucguauuuggcgaaggauccgccguccaccacccacccucauacgucgcccaccucgccuccgacuucggaguccgcgucuuccaacaagucgcccaagcauccaaagacagaaacgucgucuucucccccuacggcguagccuccguacucgccaugcuucaacucacaaccggaggcgaaacccaacaacaaauccaagccgccaugggcuucaaaaucgacgacaagggaauggcccccgcccuccgccaccucuacaaagaacuuaugggcccuuggaacaaagacgaaaucuccaccaccgacgccaucuuuguccaacgcgaccucaaacuuguucaaggcuucaugccccacuucuuccgccucuuccgauccaccgucaaacaaguagauuucagcgaaguagaacgcgcccgcuuuaucaucaacgacuggguaaaaacucacacaaaaggcaugaucucaaaccugcucggcaaaggcgccgucgaccagcucacccgccuaguccuaguuaacgcccuauacuucaacggccaguggaagacccccuuccccgacucauccacacaccgacgacucuuccacaaaucagacggaucaacagucuccgucccaaugauggcccaaaccaacaaauucaacuacaccgaauuuaccaccccagacggacacuacuacgacauccuagaacuccccuaccacggcgacacccucuccauguucaucgccgcccccuacgaaaaagaagucccccucuccgcacuaaccaacauacuauccgcccaacuaaucucacacuggaaagggaacaugacacgacucccacgacucuuaguccuccccaaauucagccucgaaaccgaagucgaccuccgcaaaccucuagaaaaccuuggcaugaccgacauguuccgccaauuccaagcagacuucaccucacuauccgaccaagaaccccuccacgucgcccaagcccuccaaaaggucaaaaucgaagucaacgaauccggaaccguagccuccagcucaaccgccgucaucgucuccgcccgaauggccccugaagaaaucauaauggaccgacccuuccuauucgucguccgacauaacccaaccgguaccguacucuucaugggccaagucauggaacccuaa

SEQ ID NO: 4418 - RNA, 1248 nt, Artificial Sequence
  AAA36797 variant
auggaagaccucugcgucgccaauacacuauucgcccuuaaccucuucaaacacuuagcaaaagccucacccacccaaaaccucuuccucagccccugguccaucuccaguaccauggcaauggucuacaugggcucccgaggcuccacagaagaccaaauggcaaaaguccuccaauucaacgaggucggcgccaacgcagucacccccaugacccccgaaaacuucacuuccugcggcuucaugcaacaaauccaaaaaggcuccuacccagacgccauccuacaagcccaggccgccgacaaaauccacuccagcuuccgaucccuaucaagcgcaaucaacgcaucaacaggcaacuaucuccuagaauccgucaacaaacuuuucggcgaaaaauccgccuccuuccgcgaagaauacauccgccucugccaaaaauacuacuccuccgaaccccaagccgucgacuuccucgagugcgccgaagaagcccgcaagaaaauaaacagcuggguaaaaacccaaaccaaaggcaaaauacccaaccuccuacccgagggcucugucgacggagauacccgcaugguccuagucaacgccguauacuucaaaggcaaauggaagaccccguucgaaaagaaacucaacggccuauaccccuuccgcgucaacuccgcacaaagaacacccguccaaaugauguaccuacgagaaaaacucaacaucggcuacaucgaagaccucaaagcccaaauccucgaacuccccuacgccggcgacgucuccauguuccuacuccuccccgacgagaucgcagacgugucaacaggccucgaacugcucgaaagcgaaaucaccuacgacaaacucaacaaauggaccagcaaagacaagauggcagaagacgaaguugaagucuacaucccccaauucaaacuagaagaacacuacgaacuccgcagcauccuccgauccaugggcauggaagacgccuucaacaaaggacgcgccaacuucuccgguauguccgaacgcaacgaccuauuccuauccgaagucuuccaccaagcaauggucgacgucaacgaagaaggcacugaagccgccgccggcaccggcggcgucaugacuggccggaccggccacggcggcccacaauucgucgccgaccacccauuccuauuccuaauaaugcacaaaaucaccaacugcauccucuucuucggccguuucuccagcccauaa

SEQ ID NO: 4419 - RNA, 528 nt, Artificial Sequence
  AAA60020 variant
augcucccccccauggcccuacccuccgucuccuggaugcuccucuccugccucaugcuccucucccaaguccaaggcgaagaaccccaacgcgaacuccccuccgcccgcauccgcugccccaaaggcucaaaagccuacggcucccacugcuacgcccuauuccucucccccaaauccuggaccgacgccgaccucgccugccaaaaacgccccucuggcaaccuagucuccguccuauccggcgccgaaggaucauucgucagcucacucgucaaauccaucggcaacuccuacuccuacgucuggaucggccuccacgaccccacccaaggcaccgaacccaacggcgaaggcugggaaugguccuccuccgacgucaugaacuacuucgccugggaacgcaaccccuccaccaucuccucccccggccacugcgccucccucucccgcucaacagccuuccuccgcuggaaagacuacaacugcaacguccgccuccccuacgucugcaaauucaccgacuaa

SEQ ID NO: 4420 - RNA, 528 nt, Artificial Sequence
  AAT11159 variant
augcucccacccauggcacuccccuccgucuccuggaugcuccucuccugccucaugcuacucucccaaguccaaggcgaagaaccccaacgcgaacuccccuccgcccgaauccgcugccccaaaggcuccaaagccuacggaucccacugcuacgcccucuuccucucccccaaauccuggaccgacgccgaccucgccugccaaaaacgccccuccggcaaccucgucuccguccucuccggcgccgaaggcucauucgucuccucccucgucaaauccaucggcaacuccuacucauacgucuggaucggccuccacgaccccacccaaggcaccgaacccaacggcgaaggcugggaaugguccuccuccgacgucaugaacuacuucgcaugggaacgcaacccauccaccaucuccucccccggucacugcgccucccucuccagauccacagccuuccuccgcuggaaagacuacaacugcaacguccgccuccccuacgucugcaaauucacugacuaa

SEQ ID NO: 4421 - RNA, 381 nt, Artificial Sequence
  AAH39863 variant
auggauaaaucgcucuugcucgagcucccgaucuugcucuguugcuuucgcgcgcucucgggcucgcucucgaugaggaacgaugccgugaacgagaucguggccgugaaaaauaacuuucccgugaucgagaucgugcaaugucgcaugugccaucuccaguucccgggcgagaaauguagcaggggcaggggcauaugcacggccacgaccgaggaagcgugcauggucgggcgcauguucaagcgcgauggcaaucccuggcucacguucaugggcugucucaagaacugugccgaugucaagggcauacgcuggagcguguacuuggucaauuucaggugcugucgcucgcacgaucucuguaacgaggacuuguga

SEQ ID NO: 4422 - RNA, 1440 nt, Artificial Sequence
  CCDS42826.1 variant
augaccacacucgcaggagcagucccccgaaugaugcgacccggccccggccaaaacuaccccagaagcggguuuccucuagaaguaucaaccccucucggccaaggccgcguuaaccaacucggcggaguauucauaaacggccgcccccuucccaaccacauccgccacaaaauagucgaaauggcccaccauggcauacgcccgugcguaaucucccgccaacuccgugucucccacggcugcgucuccaagauccuuugccgauaccaagaaaccggaucaauccgaccuggcgccauaggcgguuccaaaccaaaacagguaaccacaccagacguagaaaaaaaaaucgaagaauacaaacgcgaaaaccccggaauguucuccugggaaaucagagacaaacuacucaaagacgccgucugcgaccgcaacacaguccccuccgucuccucaauaucccgcauccuacgcuccaaauucggcaaaggcgaagaggaagaagccgaucuugaacgcaaagaagccgaagaauccgaaaaaaaagccaaacacucaaucgacggcauccucuccgaacgcgccuccgccccccaaucagacgaaggcuccgacaucgauuccgaacccgaucucccccucaaacgcaaacaacgccgaucccgcaccacauucaccgccgaacaacuugaagagcucgaacgggccuucgaacgaacccacuaccccgacauauacacccgggaagaacuagcucaacgagcuaaacuaacggaggccagaguucaagucugguucuccaaccgacgcgcccgcuggcgcaaacaagccggagccaaccaacuaauggccuucaaccaccucauaccaggagguuuccccccaacagcaaugccuacacuccccacauaccaacucuccgaaacaucauaccaacccaccucuaucccccaagcagucucggaccccagcuccacaguacaucgcccacaaccccuuccccccuccaccguccaccaauccacuauuccgucaaacccagacuccucaagcgccuacugccuacccuccacccgacacggauucuccuccuauaccgacuccuucguaccacccucaggccccuccaacccaaugaaccccaccaucggcaacggacucucaccccaagucaugggccuacuaacaaaccacggcggcgucccccaccaaccccaaaccgacuacgcucucagcccccucacuggcggccuagaaccaaccacaaccgucucagcaucaugcucacaacgccucgaccacaugaaaucccucgacucccuccccaccucccaaucuuacugucccccaaccuacuccaccaccggauacucaauggaccccgucaccggcuaccaauacggacaauacggacaguccaaaccauggacauucuaa

SEQ ID NO: 4423 - RNA, 1176 nt, Artificial Sequence
  AAA58397 variant
auggaccucgaaaagaacuaccccacaccccgaaccucccgcaccggacacggaggcgucaaccaacucgguggcgucuucgucaacggccgcccccuacccgacgucguccgccaaagaauagucgaacucgcccaccaaggcguucgacccugcgacaucagccgccaacucagagucucccacggcugcgucuccaaaauacuaggccgcuauuacgaaaccggcucaaucaaacccggcgucauaggaggcuccaaacccaaaguagcaacccccaaagucgucgagaaaaucgccgaauacaaacgccaaaacccaaccauguucgcaugggaaauccgagaccgccuccuagcagaacgcguaugcgacaacgauaccguacccuccguuuccuccauaaaccgcaucauccgcaccaaaguccaacaaccacccaaccaaccuguacccgccucaucccacucaaucgucuccaccggcuccguaacacaaguauccuccgucucaacagacuccgccggcuccuccuacucaaucucaggcauacucggcaucaccucaccuucagccgacaccaacaaacgcaaacgcgacgaaggaauccaagaaucccccguccccaacggccacagccuccccggacgcgacuuccuacgcaaacagaugcgcggcgaccucuucacacaacaacaacucgaaguacucgaccgagucuucgaacgccaacacuacucagacaucuuuaccaccacggaaccaaucaaacccgaacaaacaaccgaauacucagcaauggcaucccucgccggcggccucgacgacaugaaagccaaccuagccucacccaccccagccgauaucggauccucuguccccggcccacaauccuaccccaucguaacaggacgagaccucgccuccacaacccuaccaggcuacccaccccacgucccacccgccggccaaggcuccuacuccgcccccacacucacuggaaugguccccggguccgaguucuccggauccccauacucccacccacaauacucaucauacaacgacuccuggcgauuccccaacccaggccuccucggcaguccauacuacuacuccgcagccgccagaggcgccgccccaccagccgccgccaccgccuacgaccgacacuaa

SEQ ID NO: 4424 - RNA, 873 nt, Artificial Sequence
  AAF25807 variant
augcgcaucuucgcagucuucaucuucaugaccuacuggcaccuccucaacgcauucaccgucaccguccccaaagaccucuacguagucgaauacggaagcaacaugaccaucgaaugcaaauuccccguugagaaacaacucgaccucgcugcccuaaucguauacugggaaauggaagacaaaaacauaauccaauucguccacggcgaagaagaccucaaaguccaacacuccagcuaccgccaacgcgcccgacuacucaaagaccagcucucacucggcaacgccgcccuccaaaucacagacgucaaacuacaagacgccggcgucuaccgcugcaugaucuccuacggcggcgccgacuacaaacgaaucacggucaaagucaacgcccccuacaacaaaaucaaccagcgcauacucgucgucgaccccguaacauccgaacacgaacucaccugccaagccgaaggcuaccccaaagccgaagucaucuggaccuccuccgaccaccaaguccucuccggcaaaacaaccacaaccaacuccaaacgcgaagaaaaacuauucaacgucaccucgacccuccgcaucaacaccaccaccaacgaaaucuucuacugcaccuuccgacgccucgaccccgaagaaaaccacacagccgaacuagucauccccgaacucccccucgcccacccacccaacgaacgcacucaccuagucauacucggagccauccuccuaugccucggagucgcacuaaccuucaucuuccgacuccgaaaaggccgaaugauggacgucaaaaaaugcggcauccaggacaccaacucaaaaaaacaaucagacacacaccucgaagaaaccuaa

SEQ ID NO: 4425 - RNA, 867 nt, Artificial Sequence
  AAH74740 variant
augcaaaucccccaagcccccuggcccgucgucugggccguacuccaacucgguuggcgccccggaugguuccucgacucccccgacagacccuggaaccccccaaccuucucccccgcacuacucguugucaccgaaggcgacaacgccacuuucaccugcuccuucucaaacacauccgaauccuucguccucaacugguacagaaugucaccaucaaaccaaaccgacaaacucgcagccuuccccgaagaccgcucucaaccaggacaagacugccgcuuccgcgucacccaacuacccaacggccgcgacuuccacauguccgucguccgcgcacgccgaaacgacuccggcaccuaccucugcggcgcaaucucgcucgcacccaaagcccaaaucaaagaaucccuacgcgccgaacuacgagucaccgaacgccgcgccgaaguccccaccgcccaccccucacccuccccacgccccgccggccaauuccaaacacucgucgucggcgucgucggcggccucuuaggaucacucguccuacucgucuggguacucgcagucaucugcucccgcgccgcccgcggaaccaucggcgcacgccgcaccggacaaccacuaaaagaagaccccuccgcaguccccgucuucuccguagacuacggcgaacucgacuuccaauggagagaaaaaacacccgaaccccccguccccugcgucccugaacaaaccgaauacgccacaaucgucuuccccuccggcaugggaacauccagccccgcccgccgaggcuccgcagacggaccccgcuccgcccagccccuacgccccgaagacggccacugcucauggccacuauaa

SEQ ID NO: 4426 - RNA, 1008 nt, Artificial Sequence
  AAC95296 variant
augggcucggcaucacccggccucucauccgucuccccaucccaccuccuacucccacccgacacuguaagccgcacaggacucgaaaaagccgccgcaggcgccgucggccuagaacgacgagacugguccccaagcccucccgcaacccccgaacaaggccucuccgcauucuaccuaucauacuucgacaugcucuacccagaggacuccucaugggccgcaaaagcccccggagccuccucuagagaagaacccccagaagaaccagaacaaugccccguaaucgacucccaagccccagccggaagccucgaccuaguccccggcggccuaacccucgaagaacacucccuagaacaaguccaauccauggucguaggcgaaguccugaaagauaucgaaacagccugcaaacuacuaaacauaaccgccgacccaauggacuggucccccucaaacguccaaaaauggcuacucuggaccgagcaccaauaccgccucccacccaugggcaaagccuuccaagaacucgcaggcaaagaacucugcgccauguccgaagaacaauuccgccaacgcucaccccuaggcggcgacguccuccacgcccaccucgacauauggaaauccgccgcauggaugaaagaacgcaccagccccggagccauacacuacugcgccuccaccucggaagaauccuggaccgacuccgaaguugacagcuccugcucaggccagcccauccaccucuggcaauuccuaaaagaacuccuccuuaaaccccacagcuauggccgauucauccgcuggcucaacaaagaaaaaggaauauucaaaauagaagacuccgcccaaguagcccgacucuggggcauccguaaaaaccgccccgccaugaacuaugacaaacucuccagaagcauacgccaguacuacaagaaaggcaucaucagaaaaccagacaucucccaacgccucgucuaccaauucguccaccccauauaa

SEQ ID NO: 4427 - RNA, 2217 nt, Artificial Sequence
  AAA36429 variant
augcagccaagaugggcccaaggugcgaccauguggcucggcgucuuacucacccuccuccucugcagcucccuggaagggcaggaaaacuccuuuaccaucaacagcgucgacaugaaaucacuccccgacuggaccguccaaaaugggaaaaaccuaacccuccaaugcuucgccgacguaagcacuacaucccacguaaagccgcaacaucaaaugcucuuuuacaaagacgacguccucuucuacaacaucuccucgaugaaaagcacggaaucguauuucauaccugaggugagaaucuacgacuccggcaccuacaaaugcaccguaaucgucaacaacaaagagaaaaccacugccgaauaccaacuccucgucgaaggugucccguccccacgcgucacccucgacaagaaagaagcaauccaaggcggcauaguacguguuaacugcucaguacccgaagaaaaagcccccauccacuucaccaucgaaaaacuagaacucaacgaaaagaugguaaaacuuaaaagagagaaaaacucccgcgaccaaaacuucguaauacuagaguucccagucgaagaacaagaccguguccucagcuuccgaugccaagccagaauaaucagcggcauccacaugcaaacgagcgaauccacaaaauccgagcuagucaccguaaccgaaucauucagcaccccaaaauuccacaucucaccaaccggaaugaucauggaaggagcacaauuacacaucaaaugcacaauccaaguaacccaccuagcccaagaguucccagaaauaaucauccaaaaagacaaagcaaucgucgcccauaaccggcacgguaacaaagccgucuacuccguaauggccaugguagaacacuccgguaacuauaccugcaaagucgagagcucccguaucagcaaagucagcagcaucgucguaaacaucaccgaacuauucuccaaaccagaacuagaaagcucauucacccaccucgaucaaggcgaaagacucaaccucucauguuccaucccaggcgccccucccgcaaacuucaccauccaaaaagaagacacaauagucucccagacccaagacuuuacgaaaaucgccuccaaauccgacagcggaaccuacauauguaccgcaggcaucgacaaagucgucaagaaauccaacaccguccaaaucguagugugcgaaaugcugucccaaccccgaauuagcuacgacgcccaauucgaagucaucaaaggccaaaccauugaggucagaugcgaaucgaucucagguacccuacccauauccuaccaacuacucaaaacguccaaaguacucgaaaacucaaccaaaaacaguaacgacccggccguauucaaagacaaccccacagaagacgucgaauaccaaugcgucgccgacaacugccacucacacgccaaaaugcucucagaaguccuccgcgugaaaguaaucgccccaguggacgaaguccaaaucagcauccucagcuccaaaguaguggaaagcggcgaggacauagugcuccaaugcgcaguaaaugagggcuccgguccaaucaccuacaaauucuaccgagaaaaagaaggcaaacccuucuaccaaaugacgagcaaugccacccaagccuucuggacaaaacaaaaagccuccaaagagcaagaaggagaauacuacugcacggccuucaaccgcgcaaaccaugcaagcuccguaccacgcucaaaaauccucaccguacgaguaauccucgccccguggaagaaaggacugauagcagucgucauaaucggggucaucaucgcccuccucaucauagccgcaaaauguuauuuccuccgcaaagcgaaagcaaaacaaaugccagucgaaaugucacgacccgcggucccccuccuaaacucaaacaacgagaaaaugagcgaucccaacauggaagccaacagccacuacggacacaacgaugacguccgcaaccacgcaaugaaaccaauaaacgacaacaaagaaccacucaacucagacguccaauacacugaaguccaaguauccuccgccgaaucccacaaggacuuaggcaagaaagacacagaaaccgucuacuccgaaguccgcaaagccguacccgacgccguagaguccagauacucacgaacugaagggucucucgacgggaccuag

SEQ ID NO: 4428 - RNA, 2736 nt, Artificial Sequence
  AAG23134 variant
auggcacaacucuuccuaccgcuccuagcagcgcucguccuggcacaagcaccagccgcccucgccgacgucuuagaaggagacucgagcgaggaccgcgcauucagaguucgcauagcaggagacgcaccccugcaaggaguacucggaggcgcacuaacgauaccaugccauguccacuaccuccggccacccccaucccgcagagccguacucggaagccccagagucaaauggaccuuccuguccaggggacgugaagcagagguccucguggccaggggaguccgaguaaaagucaacgaagcauacagguucagagucgcacucccggcauacccagccagcuugaccgacgugucacuagcacuuucagaacugagacccaaugacagcggaaucuaccguugcgaaguacaacacgguaucgacgacagcuccgacgcagucgaagucaaggugaaaggcguaguauuccucuaccgcgagggcucagcacgauacgcguuuucauucuccggagcccaagaggccugcgcgcgaaucggcgcacacauagcaacacccgaacaacucuacgcagccuaccuuggcggauacgaacagugcgacgcaggguggcuuucagaccaaacaguucgcuaccccauccaaaccccacgagaagccugcuacggcgacauggacggauuccccggaguaaggaacuacggcgucgucgaccccgaugaccuguacgacgucuauugcuacgcagaggaccucaacggggaacuauucuuaggagauccaccagaaaaacucacacuagaagaagcucgcgccuacugccaggaacggggcgcagaaaucgccaccacaggacaacuauacgcagcaugggacgggggacucgaccacugcucacccggauggcucgcagacggauccguacgauaucccaucguaacccccucgcaacgaugcggcggcggacugccagguguaaaaacacucuucuuauucccaaaccagacaggauucccaaacaagcacagccgcuucaacgucuacugcuuuagagacagcgcccagccaagcgcaauaccagaagccagcaacccagcaagcaacccggcauccgacggacuagaagcgauugugaccgucacagagaccuuagaagaacuacaacucccacaagaagccacagagucagaaucacgaggggccauauacucgauccccauaauggaggacggaggaggaggaagcuccacccccgaagacccagcagaagcaccccgcacccuccuagaguucgaaacacaaagcauggucccacccacgggauucucagaagaagagggaaaagcgcuagaagaagaggagaaauaugaagacgaagaagaaaaagaagaagaggaagaagaagaagaagucgaagacgaagcacugugggcauggccgucagaacucucgaguccaggaccggaagcuagccuacccacagaaccugcagcacaagaggaaucacuaucucaggcccccgccagagccguccuacagcccggcgccagcccccuacccgacggcgaaagcgaagcaagcagacccccgcgcguacacggaccacccaccgaaacacuccccacaccucgagaaagaaaccuugccucaccaucccccucaacccucguugaggcccgagaaguaggagaagcaaccggaggucccgagcuaagcggcguaccgcggggagaaagcgaggagacaggcucgucagaaggcgcgccaucgcuccugccggccacaagagccccagaaggaacacgcgaacucgaagcacccagugaagauaacagugggcgaacagcgccagccggcacaagcguacaagcacaaccgguccugcccaccgacucagccuccagaggaggagucgccguaguaccagccagcggugacugcgugcccagcccaugccacaacggaggaacuugccucgaagaagaagaaggaguacggugccuaugccucccagguuacgggggcgaccucugcgacguaggccuccgauucugcaauccaggaugggacgccuuccaaggcgccugcuauaaacacuucagcacucggcgcagcugggaagaggcagaaacacaaugcagaauguacggagcacaccuagcguccaucuccacccccgaagaacaagacuucauaaacaauagauaccgagaauaccaguggauagguuuaaacgaccgaaccaucgaaggggacuuccuuuggucggacgguguaccccuccuauacgaaaacuggaacccaggacaaccagacagcuacuuccuaagcggcgaaaacugcgucguuaugguauggcacgaccagggacaauggagugacguuccuugcaacuaccaccucagcuauaccugcaagaugggguugguaucaugcggaccaccucccgagcuaccccuggcacaaguauucggccgaccccgacuacgauacgaggucgacaccguccucagguacagauguagagaaggacuagcccaacgcaaccucccacuaauucgcugucaagaaaauggccgcugggaagcaccccagaucagcugcgucccccgucggcccgcccgagcgcuccaccccgaagaagacccagaaggcaggcaaggccgacuacucggacgauggaaagcacuacucauaccaccaagcucaccgaugccaggccccuga

SEQ ID NO: 4429 - RNA, 3321 nt, Artificial Sequence
  AAA60049 variant
augcgcuuaccaggugccaugccagcucuugcccuaaaaggcgagcuauuacuacucagccuucuucuccuacucgaaccccaaauaucgcaaggccucguugucaccccgcccggucccgagcuaguccuaaacguauccuccacauucguccuaaccugcuccggcagugcccccguagucugggaacgcaugucccaggaaccuccccaagaaauggcaaaagcacaagacggcacauucucauccguccucacacuuacaaaccucacuggacucgacaccggagaauacuucugcacccacaacgacucccgcgggcuagagaccgaugaacgcaaacgccuauacaucuuugugcccgacccaacagucggauuccuccccaaugaugccgaggaacuauucaucuuccuaacagaaaucaccgaaaucacuauccccugccgagucacggauccccaacucguaguaacacuacaugagaaaaagggagacguugcauuaccaguacccuacgaccaccagcgcggcuucagcgggaucuucgaagaccguagcuacaucuguaaaacgaccaucggcgaccgcgaaguagauagcgacgccuacuacgucuaccgacuccaaguuucaucaaucaacgucuccgucaacgccguacaaaccguaguacgacagggcgaaaacauaacgcuaaugugcaucguaaucggcaacgaaguuguaaacuucgaauggaccuacccacgaaaagaaaguggccgacucgucgagcccgucaccgacuuccuuuuagacaugccauaccacauaagaucgauacuacacauccccucugcggagcuugaagacucaggcaccuacaccuguaacguaaccgaauccgucaacgaccaccaagaugaaaaagccauuaacaucaccgucgucgagagcggcuacguacgccuccucggcgaagugggcacccuacaauucgcagaacuccaccgcucccgcacacuccaaguagucuuugaagccuaucccccacccacaguccuuugguucaaagacaaccgcacacuuggagacuccuccgccggagagauugcgcuaagcacccggaacgugucggaaacgagguacgucuccgaacucacgcugguacgcguuaaaguagccgaagccggacacuacacaaugcgcgcauuucacgaggaugccgaaguccaacucucguuccaacuccaaaucaauguccccguccgaguccuagagcucagcgagucucaccccgacagcggugaacagaccguacgcugccgaggaagagggaugccccaacccaacaucauuugguccgcgugccgcgaccucaaacgaugcccucgagaacuaccucccacccuccuagguaacuccuccgaggaagaaucucaacuagaaacgaacguaacguacugggaagaagaacaggaguucgaagugguaucaacccuacgucuacagcacguagaccgcccccugagcguccgauguacccuccgcaaugccguaggccaagauacucaagaagucauagucgucccccacaguuuaccguucaaaguaguagucaucuccgcaauacuggcacucgucgugcuaacaauaauaucccucauuauccucaucaugcuuuggcaaaagaaaccccgcuacgaaauccgauggaaagucaucgaaagcgucucuucugacggacacgaauacaucuacgucgacccaaugcaacuuccauacgacuccaccugggaauuaccccgcgaucagcuaguccucggccgcacacuaggcucuggugcguucggacaagucgucgaagcgacugcacauggccucucacacucccaagccacaaugaaaguugccgucaaaaugcuaaaauccaccgcccgauccucggaaaaacaggcccucaugagcgaacuaaaaauaaugucccaccucggcccucaucuaaaugucguaaaccuccucggcgccuguaccaaaggcggaccaaucuacaucaucacagaauauugccgcuauggcgaccuagucgacuaccuccaccgaaacaaacauacuuuccuacaacaccauagcgacaagcgacgacccccauccgcagaacucuacuccaacgcgcugccagucggacuuccccugccaucgcaugucucuuuaacaggagaauccgacggaggcuacauggacaugucaaaagaugaaucuguagauuauguucccaugcucgacaugaagggugaugucaaguaugcugacaucgaaagcucuaacuacauggccccguacgacaauuacgugccauccgcccccgaaagaacaugccgcgccacccuuaucaacgaauccccugugcucuccuacauggaccuagucgguuucucauaccaagucgccaacggcauggaguuccuagccuccaaaaacugcgugcacagagaccucgcggcccgcaacguacuaauaugcgaaggcaagcuagugaaaaucugcgacuucggacucgcccgcgacauaaugcgugacucaaacuacaucucaaaaggcucaacguuccuaccacucaaauggauggcaccggaaagcaucuucaacucccuauacacaacacucagcgaugucuggagcuucggcauccugcucugggaaaucuuuacccuaggcggcacgcccuaccccgagcuccccaugaacgaacaguucuauaacgccauaaaacgcggcuaccgcauggcucaaccggcccacgcauccgacgaaaucuaugaaaucaugcaaaaguguugggaagaaaaguuugagauaagaccaccauucucgcaacucguacuccuacuagagcgucugcucggagaaggcuacaaaaagaaauaccaacaaguggacgaagaauuucuccgaagugaccaccccgcgauccuccgcagccaagcacgauuaccaggauuccacggccuccgcagcccacucgacacaucaucaguccucuacaccgccgugcaaccaaacgagggggauaacgacuauaucaucccgcuacccgauccgaaacccgaagucgcagacgaggggccccucgaaggcucccccucccucgcgucaucaacacuaaacgagguaaacacaucauccacgaucucgugcgacucaccacucgaaccccaagaugaacccgagccagaaccacaacuagaacuccaagucgagcccgaacccgaacucgaacaacucccugauagcggcugcccagcgccccgcgccgaagccgaggauucauuccucuaa

SEQ ID NO: 4430 - RNA, 942 nt, Artificial Sequence
  EAX03935 variant
augcuacucucaaaaaucaacucccucgcccaccuucgcgccgccccaugcaacgaccuccacgccacaaaacucgcccccggcaaagaaaaagaaccacucgaaucccaauaccaagucggcccacuccucggcucaggcggauucggcuccgucuacucaggcauacgagucuccgacaaccuccccguagccaucaaacacguagaaaaagaccgcaucuccgacuggggcgaacuccccaacggaacccgagugccaauggaagucguccuccucaagaaaguauccucuggcuucuccggcgucauccgccuccucgauugguucgaacgccccgacuccuucguccucauccucgaacgcccagaacccguccaagaccucuucgacuucaucaccgaacgaggcgcccuccaagaagaacuagcacgcuccuucuucuggcaaguccucgaagccguccgccacugccacaacugcggcguacuccaccgcgacauaaaagacgaaaacauccucaucgaccuaaaccgcggcgaacucaaacucaucgacuucggcucaggagcccuacuuaaagacacagucuacaccgauuucgacggcacccgagucuacucaccacccgaauggauccgcuaccaccgcuaccacggcagauccgccgcagucuggucacuaggcauccuacuauacgacauggucugcggagacauccccuucgaacacgacgaagaaaucauccgaggccaagucuucuuccgacaaagagucuccuccgaaugccaacaccucauccgcuggugccucgcccuccgcccaucagaccgacccacguucgaagaaauccaaaaccaccccuggaugcaagacguccuccucccccaagaaaccgccgaaauccaccuccacucccucucgcccggccccuccaaauaa

SEQ ID NO: 4431 - RNA, 303 nt, Artificial Sequence
  AAB81333 variant
auggccgaugaagagaaauugcccccgggcugggaaaagcgcaugagcaggcccucgggcaggggcuauuacuuuaaccauaucacgaacccgagccagugggagcgaccgagcgggaacucgagcucgggcgggaaaauauggcagggcgagcccgcgcgcgugcgcaggagccaucucuuggucaagcccgugaaagcggccuuggacuuggccgcgggcaaucacccggaccagggcgggggcccgggcgcggaccagcgcuugcacccggaagaucaagggcgcagggaagggcucuag

SEQ ID NO: 4432 - RNA, 492 nt, Artificial Sequence
  AAC50492 variant
auggccgaugaagagaaacugccaccgggcugggaaaagcgaaugagcaggagcucaggcagggucuauuacuuuaaccauaucacgaacgcgagccagugggagcgcccgagcgggaacucgagcucaggcgggaaaaauggccagggcgagcccgcgcgcgugcgcuguagccaucucuuggucaagcacucgcaaucacgaaggcccucgagcuggcgccaggaaaagaucacgcgcacgaaagaggaagcgcucgagcucauaaacggguacauacaaaagaucaagagcggggaagaggacuuugaaucgcucgcgagccaguucucggacuguagcucggccaaggcccggggcgaucucggggccuuuagcaggggccagaugcagaaaccguucgaggacgcgagcuuugcccugcgcacgggcgagaugucgggcccggucuuuaccgauagugggauccauaucauacucaggaccgaguga

SEQ ID NO: 4433 - RNA, 138 nt, Artificial Sequence
  AAH31971 variant
augcaaaaacccuucgaagacgccuccuucgcccuccgcaccggcgaaauguccggccccgucuucaccgacuccggcauccacaucauccuccgcaccgaaugcuggcgccaaacccgcggccccaacugcuucuaa

SEQ ID NO: 4434 - RNA, 639 nt, Artificial Sequence
  AAG22596 variant
augaaaguauucaaauucaucggacucaugauccuccucaccuccgccuucuccgccggcuccggccaaucccccaugaccguccucugcuccaucgacugguucauggucaccguccaccccuucaugcucaacaacgacgucugcguccacuuccacgaacuccaccucggccuaggcugcccccccaaccacguccaaccccacgccuaccaauucaccuaccgcgucacagaaugcggcauccgcgccaaagccgucucccaagacauggucaucuacuccaccgaaauacacuacuccuccaaaggcacccccagcaaauucgucauccccgucucaugcgccgccccccaaaaaucacccuggcucaccaaacccugcuccaugcgcguagccuccaaaucccgagccaccgcccaaaaagacgaaaaaugcuacgaagucuucucccucucccaauccucacaacgccccaacugcgacugcccccccugcgucuucuccgaagaagaacacacccaaguccccugccaccaagccggcgcccaagaagcccaaccccuacaacccucacacuuccucgacaucuccgaagacuggucccuacacaccgacgacaugaucggcuccauguaa

SEQ ID NO: 4435 - RNA, 1986 nt, Artificial Sequence
  AAB00386 variant
auggaccucgucuuaaaacgcugucuccuccaccucgcugucaucggcgcacuacuugccguaggcgccaccaagguaccacgcaaccaagauuggcucggaguuucccgacaacuacgcacaaaagccuggaaccgccaacucuaccccgaauggacagaagcacaaagacucgacugcuggagaggcggccaggucucucugaaaguuucaaacgacggucccacacuaaucggcgccaacgcauccuucucaaucgcacucaauuuccccggcucccaaaaaguccuccccgacggacaagucaucuggguaaauaacaccaucaucaacggaucccaagucuggggcggacaaccagucuacccacaagaaacggacgacgcaugcaucuucccagacgguggcccaugcccaucuggcucauggagccaaaaacguucauucguauacguauggaaaaccuggggacaauacuggcaaguacucggcggcccagucuccggucucucaauaggcacgggccgggcaaugcuaggcacccacacaauggagguaaccgucuaccaccgaagaggcucacgguccuauguaccacucgcacacaguucaucagcauucacaauaacagaccaaguuccauuuucuguuagcgucucacaacuccgagcccucgacgguggcaacaaacacuuccucaggaaccaaccacuuacuuucgcacuacaacuacacgacccaagcggauaccucgccgaagccgaccuaagcuauaccugggacuucggcgauagcuccgggacacucauaucaagagcccucguagucacacacaccuaccuagagcccggaccagucaccgcucaagucguucuccaagccgcaauaccgcugacaucgugcggaagcucgccuguacccggcacaacugacggccaccgacccaccgccgaagcccccaacaccaccgccggccagguccccaccacagaggucgucggcaccacccccggacaagcucccaccgcugaaccauccggcaccaccucagugcaaguaccaaccaccgaaguaaucucuaccgcacccguccagaugcccacagcugaaucaacuggcaugacccccgaaaagguccccguaagcgaagucauggguaccacgcucgccgaaaugucaacgccagaagccacgggcaugaccccagccgaagucucaauaguuguccucagcggaacaaccgccgcacaagucaccaccacagaaugggucgaaacuaccgcgagagaacuacccauacccgaacccgaaggaccagacgcauccagcauaauguccacagaguccauaaccgggagccucggcccccuccuagacgguaccgcaacccuccgccucguaaaacgccaagugccucuugacugcguacucuaccgcuacggaucauucaguguaacgcuugacaucguacaaggaauagaauccgccgaaauacuccaagccguaccauccggagaaggcgaugcauucgaacucaccguuucaugccagggcggccuccccaaagaagcaugcauggaaaucuccucccccggcugccaaccacccgcccaacgccucugucaaccagugcuaccgucacccgccugccaacugguccuucaccaaauccucaaaggugguucaggcacauacugccucaacguaucccuagcugacaccaacucccuagcaguagucuccacacagcucaucaugcccggccaagaagccggccuaggccaagucccccuaauagucggcauucuccuaguccucauggccguaguccuggcaucccuuauauaccgcagacgccucaugaaacaggacuucuccgucccacaacuaccccacucauccagucacuggcuacgacuccccagaaucuucugcagcugccccauuggagaaaauagcccccuccuauccggacaacaaguuuga

SEQ ID NO: 4436 - RNA, 2649 nt, Artificial Sequence
  CCDS10255.1 variant
auggaacccgcccccgcacgcuccccucgcccccaacaagauccugcccgcccccaagaacccaccaugccaccacccgaaacacccucagaaggccgacaacccucccccucccccagccccacagaacgcgcucccgccucggaagaggaauuucaauuucugcgaugccaacaaugucaagcagaagccaaauguccuaagcuccuaccgugccugcacaccuuauguuccggcugccucgaggcuucaggaaugcagugcccaauaugccaggcaccauggccccugggagccgacaccccugcacucgacaacguuuucuuugaaucacuacaacgccgcuuaagcguauacagacaaaucguagacgcacaagcaguaugcacaagaugcaaagagagcgccgacuucuggugcuucgaaugcgaacaacuccuaugcgccaaaugcuucgaagcacaccaaugguuccuaaaacacgaagcccgaccccucgcagaacucagaaaccaguccguccgagaguuccuggacggaacacgaaaaaccaacaacauuuucugcuccaaucccaaccaccgaacuccgacacuaacauccaucuauugcagaggcuguucuaaaccacucuguugcucgugcgcccuccucgacucuucgcauucagaacucaaaugcgauaucucagccgaaauacaacagagacaagaagaacucgacgccaugacucaagcccuccaagaacaagacuccgccuucggcgccgugcaugcacaaaugcacgccgccgucggccaacuaggccgcgcccgcgccgaaacagaagaacucauacgcgaacgcguacgacaaguuguagcccacguccgcgcccaagaacgcgaacugcuagaagcagucgacgcuagguaccaaagagacuaugaagaaauggcaucacgccuuggccgccuggacgcuguccuacaaaggauucgcaccggcuccgcccuuguccaaagaaugaaaugcuaugccuccgaccaagaaguccucgacaugcacggcuuccuccgacaagcccucugucgacuccgacaggaagaaccccaaagccuacaggccgccgugcgcaccgacggcuucgaugaguucaaaguucgacugcaggaccuauccuccugcaucacacaaggcaaagacgcugccgucuccaagaaagcauccccggaagccgccucaacaccacgagauccaaucgacguugaucucccagaagaagccgaacgcguaaaagcacagguccaggcccuaggccuagccgaagcccagcccauggcuguaguccaguccguaccgggggcacacccggucccggucuacgcguucucaauuaaaggcccaucauauggcgaagacgucucuaacacgaccaccgcucaaaaacgaaaaugcagccaaacucaaugcccccguaaaguaauaaaaauggaaagcgaagaaggaaaagaggccaggcuagcccgcuccagcccagaacaacccagacccucaacaucaaaagccguaucgccgccccaccucgacggacccccaucaccuagaagcccaguuaucgguuccgaggucuuccugcccaacucaaaccacgucgcaagcggagccggcgaagccgaggaaagagucgucguaauaagcagcucagaggacucugacgcagaaaacagcagcucccgcgaacuagacgacucaucauccgaaucaagcgaccuccaacucgaaggccccucaacacuaagaguccuggacgaaaaccuggccgauccccaagcggaagaccgcccccuaguuuucuucgaccugaaaauugacaacgaaacccagaaaaucucccaacucgccgcaguaaaccgagaaucaaaauuccgcguugucauccaacccgaggcuuucuucagcaucuacuccaaagccgucucacucgaagucggccuucaacacuuccuaucguuccuauccucaaugcgccgaccaauccuagccugcuacaaacuguggggaccaggacugcccaacuucuuccgagcacucgaagacauaaaccgacucugggaguuccaagaagcaaucucagguuuccucgcggcccucccacucauccgcgaacguguaccaggcgcauccagcuucaaauugaaaaaccucgcacaaacauaccucgcccguaacaugucggaaagaucugcaauggccgccguccuggcgaugcgagacuugugucgccuguuagaagucagcccgggcccacaacucgcacaacacgucuaccccuucucuucacuacaaugcuucgccagccuccaaccacugguacaagcagcuguccuuccuagagcugaagcucgccuacucgcccuucacaacgucuccuucauggaacugcuguccgcucaccgccgagaccgccaaggcggacucaaaaaguacuccagauaccucucacuacaaacuaccacacucccaccagcucaaccugcauucaaccuacaagcccuaggcacguacuucgaaggacuucucgaaggaccugcucuagccagagccgaaggaguaucaaccccacuagcaggaagaggccucgccgaacgcgccagccaacaaucguag

SEQ ID NO: 4437 - RNA, 3228 nt, Artificial Sequence
  CCDS46409.1 variant
augguuguagaagucgauagcaugcccgccgcauccuccguaaagaagccauuuggacuuagaaguaaaaugggcaaauggugcugccgcugcuucccaugcugccgcgaaucagguaagagcaacguggggaccucaggcgaucacgacgauuccgcaaugaaaacgcuacggagcaaaaugggcaaauggugcaggcacugcuuucccugcugcaggggauccggaaaaaguaacgucggcgcauccggcgaccaugacgacagugcaaugaagacacuaagaaacaaaauggggaaauggugcugucacuguuuuccauguugccgaggcuccaguaagucaaaaguaggcgcuuggggagacuacgacgacucagcuuucauggaaccacgauaucauguccgaggagaagaccucgauaaacuacacagagcagcgugguggggaaaaguaccacgcaaggaccuaaucgucauguugcgcgacacagacguuaacaaacaggacaaacagaagagaaccgcacuucaccuggccagcgccaacggaaauuccgaagucguaaaacuucuuuuagaccgacgcugccaacuaaacguccuagauaacaaaaagcggaccgcgcuaaucaaggcaguacaaugccaagaagacgaaugcgcccucaugcuccucgaacacgggaccgaccccaacauccccgacgaauacgggaacaccacgcuccacuacgcaauauacaacgaagacaaacuuauggcaaaagcacuccuacucuacggagcggacaucgaaagcaaaaacaagcacggacuaacaccccucuuacucgguguccacgaacaaaaacaacaagucguaaaauuccugaucaaaaagaaagccaaccucaaugcccuggaccguuacgggcgcaccgcccuaauacucgcaguauguugcggcucagccucuauaguaucgcuacuccuagaacagaacauagacguaagcagccaagaccuaucagggcaaacagcacgugaauaugcaguauccagccaccaccacguaaucugccaacuacuaagcgacuacaaagaaaaacaaaugcugaagauuagcucugaaaacuccaacccagaacaggaccuaaaacugaccuccgaagaagagagccaacgcuucaaaggcagcgaaaacagccaaccagagaaaaugucccaggaacccgaaauaaacaaagacggagaccgagaagucgaagaagagaugaagaaacacgaguccaacaacgugggacugcuagaaaaccucaccaacggagugacggcaggcaauggcgacaacggccucauaccccaacgaaaaagcagaacaccggaaaaccaacaauuccccgacaacgaaucggaggaauaccacagaaucugcgaacuacugagcgacuacaaagagaaacaaaugccuaaauacuccagcgagaacuccaauccagaacaggaccuaaagcucacuucagaagaagaaagccaacgauuaaaaggaagugaaaacggccagcccgagaaaaggagccaagaacccgaaaucaacaaggacggagaccgcgagcuagagaacuucauggcaauagaagaaaugaagaaacaccgcuccacccacguaggguuccccgagaaccucaccaacggagcgaccgcuggaaacggagacgacggccuaaucccaccaaggaaaaguagaacccccgaaucccagcaauucccagauacggaaaaugaagaauaccacuccgacgaacaaaacgauacacagaaacaauucugcgaagaacaaaacacugguauacuacacgacgagauccuuauacaugaggaaaaacagaucgaaguagucgagaaaaugaacucagaacucagucuauccugcaagaaagaaaaagacauacuccacgaaaauuccaccuuacgcgaggaaaucgcuaugcuccgucuggagcuagacaccaugaaacaccaaagucaacugcgggaaaagaaauaccuggaagacaucgagucaguaaagaaacgcaacgacaaccuacucaaagcccuccaacuaaacgaacucaccauggacgacgacacggcuguacucguaaucgacaauggaagcggaaugugcaaagcaggguucgccggagacgacgcuccccgagcaguguucccaucaauagucggaagacccaggcaacaggggaugaugggcggcaugcaccaaaaagagagcuacgucggcaaagaagcccagagcaaacgggggauccucacccucaaauacccaauggaacacggcaucauaacaaacugggaugauauggaaaagaucuggcaccacacauucuacaacgaacuacgcgucgccccggaggaacauccugugcuccuuaccgaagccacacucaaucccaaagcaaauagagagaaaaugacacaaaucauguucgaaaccuucaacacacccgccauguacguggcaauccaagcaguccuaucacucuacaccuccggccggacaacaggcauagucauggacucaggcgacggaguaacacacacagucccgauauacgaaggaaacgcccugccacacgccacacuacgucuggacuuagccggacgagaacuaccagacuaccucaugaaaauauugacagagcacggguaccgguuuacuacaauggcggaacgggagaucguacgagacaucaaagaaaaacucugcuacgucgcauuagauuucgagcaagagauggcaaccguggcgagcucaucaagccuagagaaaagcuacgaacucccugacggacaagugauaacgauaggcaacgaaagguuccgaugcccagaagcacuguuccagccuugcuuccucggcauggaaucaugcggaauacacgagaccaccuucaacagcaucaugaaaagcgacguggacauaagaaaagaccuauacaccaacaccguacuauccggcgguacuacaauguaccccggaauggcccaccgaaugcagaaagaaauagcugcccucgcacccagcaugaugaaaauaagaauaaucgccccgcccaaacguaaauacagcgucuggguaggaggaaguauacucgcaucacuuucgacguuccagcaaauguggauaucaaaacaagaguacgacgaaucgggccccuccaucguacaccgcaaaugucuuuaa

SEQ ID NO: 4438 - RNA, 1755 nt, Artificial Sequence
  CCDS13562.1 variant
augguagcagaagugugcucaaugcccacugcauccaccgugaagaagcccuucgaccuccgaagcaaaaugggaaaguggugccaccacagauuccccugcugcaggggaucagggaaaagcaacaugggaaccucaggcgaccacgacgacuccuucaugaaaaugcuaagaagcaaaaugggaaaaugcugcagacacugcuucccaugcugccgaggcuccgggaccagcaacguaggcacgagcggcgaccacgaaaacuccuucaugaaaaugcuccgcucgaaaaugggcaaauggugcugccacugcuuccccugcugccgaggaagcggaaaaucaaacgucggggcauggggagacuacgaucacagcgccuucauggaaccccgauaucacauacgacgcgaagaccucgacaaacuccaccgcgccgccugguggggcaaaguaccacgaaaggaccucauugucaugcugcgcgacaccgauaugaacaagcgcgacaaagaaaaacgaacagcacuccaucucgccagugcaaacggaaauuccgaagugguccaacuacuauuagaccgaagaugccaacucaacguccuagacaacaagaaacgcacggcacucaucaaagcaauacaaugccaagaagacgaaugcguacuaaugcuacucgaacacggagccgacagaaacauacccgacgaauacgggaauaccgcacuccacuacgcuauauacaacgaagacaaacucauggccaaggcauugcuccucuacggcgcagacaucgaauccaaaaacaaaugcggccuaacacccuuacugcucggcguccacgagcaaaaacaacaagucguaaaauuccucauuaagaagaaagccaaccugaacguacuagaccgcuacggcagaaccgcacucauccuugccgucugcugcggcucagcauccauaguaaaccuacuacucgagcaaaacguagacguaucaagucaggaccuaagcggacaaaccgcuagagaauacgcaguaagcagccaccaccacgucauaugcgaacuacuauccgacuacaaagagaaacaaaugcugaaaaucagcagcgaaaacagcaaccccgaacaagaccucaagcucacaagcgaagaagaaagucaacgacugaaagugagcgaaaacucgcaaccagagaagaugagccaggaacccgaaaucaacaaagacugcgaccgcgagguagaagaagaaaucaagaaacacggcagcaaccccgucggccucccagagaaccuaacaaacggagccucagcaggaaacggcgacgacggccuaauaccacaacgccgcucaagaaaacccgaaaaccaacaauucccagacaccgagaacgaagaauaccacagcgacgaacagaaugacacacgcaaacaacugagcgaagaacagaacacgggcaucagccaagacgagauccuaacgaacaaacaaaaacaaauagaagucgcagaacagaaaaugaacagcgaacuaucacuaagccacaagaaagaagaagaccuccuacgcgagaacuccguacuccaagaagaaaucgccaugcuacgacucgaacuggacgaaaccaaacaccaaaaccagcucagagaaaacaaaauacucgaagaaauagagagcguaaaagagaaaaccgacaaacuacuaagagcgaugcaacuaaacgaagaagcccucaccaaaacaaacauauaa

SEQ ID NO: 4439 - RNA, 1530 nt, Artificial Sequence
  EAW59519 variant
auggaacgccgccgacucuggggcucaauucaaucacgauacaucuccauguccgucuggacgucaccacgcagacucguugaacucgccggccaaucccuccucaaagacgaagcccuagcuaucgccgcccucgaacuccucccccgagaacucuucccuccccucuucauggccgccuucgauggccgucacucucagacucuaaaagcaaugguccaggcauggccauuuaccugccucccacuaggaguucucaugaaaggacaacaccuucaucucgaaaccuucaaagcaguccucgacggccucgacguucuucucgcccaggaaguccgcccucgacgcuggaaacuacaaguccuugaccuccgcaaaaacagccaccaagacuucuggaccgucugguccgguaauagagcaucccucuacuccuucccagaaccugaggccgcccaacccaugaccaagaaaagaaaagucgauggacuuuccacugaagccgaacaacccuucauccccgucgaaguccuagucgaccucuuccucaaagaaggcgccugcgaugaacucuucagcuaccucaucgaaaaagucaaacggaaaaagaacguccuacgacucuguugcaagaaacuuaaaaucuucgccaugcccaugcaagacaucaaaaugauccucaaaaugguccagcuugacuccauagaagacuuagaaguaaccuguacauggaaacuccccacacucgcaaaauucuccccauaccucggccaaaugaucaaucuccgccgccuccuccucucacacauccacgccuccuccuacauaucacccgaaaaagaagaacaauacaucgcccaauucaccucucaauuccucucccuacaaugccuccaggcccuauaugucgacucccuauucuuccuucgcggccggcuggaccaacuccuucgacacgucaugaacccccucgaaacucuuuccaucacuaacugccgucuaucagaaggagacgucaugcaccuaucacaaucccccucagucucccaacucagcguacuaucccucuccggcguaaugcuaaccgacgucucccccgagccccuacaagcccuacucgaacgagcauccgcaacacuccaagaccucguauucgacgaaugcggcauaacagacgaccaacuccuagcccuacuccccucccucucacacugcucccaacuuacuacccucuccuucuacggcaacuccauuucuaucuccgcccuccaaucccuccuccaacaccucaucggucucucaaaccucacccacguccuauaccccguacccuuagaaucauacgaagacauacacggcacccuucaccucgaacgccuagcuuaccuccacgcccgacuacgcgagcuccuaugugaacuaggacgcccuucuauggucuggcucucggccaaccccugcccccacugcggcgaccgaaccuucuacgaccccgaacccauccucugccccugcuucaugcccaacuag

SEQ ID NO: 4440 - RNA, 1530 nt, Artificial Sequence
  AAC51160 variant
auggaacgccgccgccucuggggguccauccaaucccgcuacaucagcauguccgucuggaccucaccccgccgacucgucgaacucgccggacaaucccuccucaaggacgaagcccuggccaucgcugcacuugaacuccucccccgcgaacuauucccaccccucuucauggccgcguucgacgggcgacauucccaaacgcuuaaagccaugguccaagccuggcccuuuaccugccucccccuaggcguccucaugaaaggccaacaccuucaccuagaaacuuucaaagccguccucgacggucuugacguccuccuagcacaagaaguccgaccccgacgcuggaaacuccaaguacucgaccuccgcaaaaauucacaccaagacuucuggacagucugguccggaaaccgugcaucacucuacucuuuccccgaacccgaagccgcccagcccaugaccaagaaacgaaaagucgacggccucucgaccgaagcagaacaacccuucauccccgucgaaguacucgucgaccucuuccucaaagaaggcgccugcgacgaacuauucuccuaccucaucgaaaaagucaaaagaaagaaaaacguccuacgccucugcugcaagaaacugaaaauauucgcaaugcccaugcaggacaucaaaaugauccucaaaaugguacaacucgacucuauugaagaccuagaggucacaugcaccuggaaacuacccacccuagccaaauucucacccuaccuaggccaaaugaucaaccuccgccgccuccuccuaucacauauccacgcaucuuccuacaucucacccgaaaaagaagaacaauacaucgcccaauucaccucccaauuccuaagccuccaaugucuccaagcccuauacgucgacagccuauucuuucuacgcggccgccucgaccaacuccuucgccacguuaugaacccucucgaaacccuauccaucaccaacugccgccucuccgaaggcgacguaaugcaccuaucccaaucccccuccgucucacaacucuccguccucucccuaucuggcgucaugcucaccgacgucucccccgaaccccuucaagcccuacuagaacgcgcauccgcaacccuccaagaccucgucuucgacgaaugcggcauaacagacgaucaacuccucgcccuacuucccuccuuaucucacugcucccaacucaccacucuauccuucuauggcaacucaaucucaaucucagcccuccaaucucuccuacaacaccucaucggccuaucaaaccuaacccacguccucuaccccguaccacucgaauccuacgaagauauccauggaacccuucaccuggaacgccucgccuaccuccacgcacgccuacgcgagcuccuaugugagcucggucgcccuucaauggucuggcucuccgcuaacccaugcccccacugcggagaccgcacauucuacgacccugaacccauccuaugccccuguuucaugcccaacuaa

SEQ ID NO: 4441 - RNA, 645 nt, Artificial Sequence
  CCDS8069.1 variant
auggggcuggcggggguaugugcguugaggaggagugcgggguauauauugguagggggagcgggagggcagagcgcggcggcggcggcgaggagauauagcgagggggaaugggcgaguggaggggugaggagcuuuaguagggcggcggcggcaauggcgccgauaaaagugggggaugcaauaccagcgguggagguguuugaaggggagccggggaauaaggugaacuuggcggagcuguuuaaggggaagaagggggugcuguuuggggugccgggggcguuuacgccgggguguagcaagacacauuugccgggauuuguggagcaggcggaggcgcugaaggcgaagggaguacaggugguggcgugucugagcguaaaugaugcguuugugacgggagagugggggagagcgcacaaggcggaggggaaggugagauuguuggcagauccgacgggagcguuugggaaggagacggauuuguuacuggaugauaguuuggugaguauauucggaaacaggagguugaagagguuuaguaugguggugcaggacgggauagugaaggcacugaauguggagccggaugggacgggguugacguguagccuggcgccaaauauaauaagccagcuguga

SEQ ID NO: 4442 - RNA, 309 nt, Artificial Sequence
  AAA63250 variant
auggucagguacaggguccgcagcuugagcgagagaucgcacgaggucuaucgccagcaauugcacgggcaagagcaagggcaccauggccaggaggaacaagggcucucgcccgagcacguggaaguguacgagcgcacgcacgggcaaucgcacuaucgcaggcgccauugcucgcgcaggcgcuugcacaggauccaucgcaggcaacaucgcucgugcaggcgcaggaaaaggcgcucgugcaggcacaggcgcaggcacaggcgcgggugcaggaccaggaaaaggaccugucgcaggcacuag

SEQ ID NO: 4443 - RNA, 1662 nt, Artificial Sequence
  AAH50416 variant
augguacaacgacuauggguaucccgccuacuucgccaccgaaaggcccaacuucuccuagucaaucuacuaaccuucggacucgaagucugucuugcagccggcaucaccuacgucccuccccuccuccuagaagucggcguagaagaaaaauucaugacuaugguccuugguauaggacccguccuaggacuugucugugucccccuccuaggcuccgcuuccgaccacuggcggggucgcuauggucgucgccgccccuucauuugggcccuuucccuuggaauccuacucucccucuuccuaauuccccgagccggcuggcuugccggccuccucugccccgacccccgcccccucgaacuagcccuccuaauacuaggcgucggccuccucgacuucugcggacaagucugcuucaccccucucgaagcacuacuaucugaccucuuccgcgaccccgaccacugccgacaagccuacucagucuacgccuucaugaucaguuuaggcgguugccuuggauaccuccuuccagccaucgacugggacacauccgcccuagcacccuaccucggaacccaagaagaaugccucuucggccuccucacacucaucuuucuaaccugcguugccgccacacuccucgucgcagaagaagccgccuuaggccccaccgaacccgccgaaggccucucagcaccaucacucucgccccacugcugcccaugccgcgcucgacuagccuuccgcaaccuaggcgcuuuauuaccccgucuccaccaacucugcugcagaaugccccgcacccuucgacgucuauucgucgccgaacuaugcuccuggauggcacuaaugacauucacacuauucuacaccgacuucguaggugaaggccuuuaucaagguguaccccgcgccgaacccggcacagaagcccgacgccacuacgacgaaggaguccgaaugggcucccucggccuuuuucuucaaugcgccaucucacucgucuucucccucguuauggaucgacucguccagagguucggcacccgagcugucuaccuggccuccgucgccgccuuccccgucgcagcuggcgccacuugccucucacacagcguagccguuguaaccgcauccgccgcccucacuggauucaccuuuagcgcccuccaaauccucccauacacacucgccucccuuuaccaucgcgaaaaacaggucuuccucccaaaguaccgaggcgacacgggcggcgccuccagcgaagacucccuaaugaccuccuuccuccccggcccaaaacccggagccccauuccccaacggccacgucggagccggcggauccggacuucugcccccaccacccgcccuaugcggcgcaagcgcaugcgacgucuccguucgagucguaguaggagaacccacagaagcucgcgucgucccaggccgcggaaucugucucgaccuagccauucucgacuccgcauuccuacucucccaaguagcgccaucccucuucaugggcuccaucguacaacucucccaaucaguuaccgccuacaugguaucugcugccggccucggauuagucgcuaucuacuuugcaacccaagucgucuucgacaaaucagaccucgccaaauacucagccuaa

SEQ ID NO: 4444 - RNA, 648 nt, Artificial Sequence
  CBI83574 variant
auggccucccuccaaaugcgcggcaacccaggaucccacuucugcggcggcacucucauccaccccuccuucguccuaaccgccgcccacugccuccgagacaucccccaacgccucgucaacgucguccucggcgcacacaacguccgcacccaagaacccacccaacaacacuuuucaguagcccaagucuuccuaaacaacuacgacgccgaaaacaaacuaaacgacauccuccucauccaacucuccucccccgccaaccuauccgccuccgucgccaccguccaacucccccaacaagaccaacccguuccccacggcacacaaugccuagccaugggauggggccgcgucggcgcccacgacccacccgcccaaguccuccaagaacucaacguaaccgucgucaccuucuucugccgaccccacaacaucugcaccuucgucccccgccgcaaagccggcaucugcuucggcgacuccggcggaccccucaucugcgacggcaucauccaaggcaucgacucauucgucaucuggggcugcgccacacgccucuuccccgacuucuuuacccgcgucgcccuauacgucgacuggauccgcuccacccuccgccgcgucgaagccaaaggccgcccauaa

SEQ ID NO: 4445 - RNA, 771 nt, Artificial Sequence
  AAH96183 variant
auggcccaccgcccacccucccccgcccucgccuccguccuacucgcccuacuccuauccggcgccgcacgcgccgccgaaaucgucggcggccacgaagcccaaccccacucccgacccuacauggcaucccuccaaaugcgcggcaaccccggcucccacuucugcggaggcacacuaauacaccccuccuucguccucaccgccgcccacugccuccgagacaucccccaacgccucgucaaugucguccucggcgcccacaacguccgaacccaagaacccacccaacaacacuucuccgucgcccaagucuuccuaaacaacuacgacgccgaaaacaaacucaacgacguccuccucauccaacucuccucacccgccaaccuauccgccuccguugccaccguacaacucccccaacaagaccaacccgucccacacggaacccaaugccuagccaugggcuggggcagagucggcgcacacgacccacccgcccaaguccuccaagaacuaaacgucacagucgucaccuucuucugccgcccccacaauaucugcacauucgucccccgacgcaaagccggcauaugcuucggcgacuccggcggcccccucaucugcgacggaaucauccaaggcaucgacuccuucgucaucuggggcugcgcuacccgccucuuccccgacuucuucacccgcgucgcccucuacgucgacuggauccgcucaacacuccgccgcguagaagccaaaggccgaccuuaa

SEQ ID NO: 4446 - RNA, 2760 nt, Artificial Sequence
  CCDS45721.1 variant
auguggcuggcugcagccgcccccucccuagcccgccgccuacucuuccucggucccccacccccaccccuccuccugcucguuuucucgagaucauccagacgacgacugcacagcuuaggccucgccgcgaugcccgagaaaagaccguucgaaagacuacccgccgacguaagcccaaucaacuacucccuaugccucaaaccagaccuccucgauuucacauucgaagggaaacucgaagccgcagcgcaaguuagacaagcaaccaaccaaaucguuaugaauugcgccgacaucgacaucauaacagcauccuaugccccagaaggggaugaagaaauccacgcgacaggauucaacuaccaaaacgaagacgaaaaaguaacccucucuuuucccagcacacuccagaccggcaccggaacacuaaaaauugacuucgucggcgaauugaacgauaaaaugaaaggauucuacagaucaaaauacacaaccccauccggugaaguccgcuacgcagccguaacacaauucgaagccaccgacgcccgacgagcguucccgugcugggacgaacccgcaaucaaagccacguucgacaucucccuaguaguccccaaagaccgaguagcacucucaaauaugaacgucaucgaccgcaaacccuaccccgacgaugaaaaccuagucgaggucaaauucgcacgaacccccguuaugucaaccuaccucgucgcguucguugugggcgaauacgacuucguagaaacccgauccaaggauggcguaugcgucagagucuacacaccuguaggcaaagcagagcaagguaaguucgcccuagaagucgcggccaaaacccugcccuucuacaaagacuacuucaacguaccauauccacugccaaaaauagaccucauagcuaucgcggacuuugcagccggugcaauggaaaacuggggacugguuacauaccgcgaaaccgcccuauuaaucgaccccaaaaacagcugcagcagcucacgccagugggucgcccuugucguaggccacgaacuggcccaccaaugguucggcaaccucgucacaauggaaugguggacccaccucugguuaaacgaaggguucgcgagcuggauagaauaccugugcgucgaccacugcuucccagaguacgacaucuggacccaauucgucuccgccgacuacacacgagcccaggaacuggacgcccuagauaacucccaccccaucgaagucuccguaggccaccccuccgaagucgacgagauauucgacgccaucuccuacuccaagggcgcaagcguaauccgcaugcuacacgacuacauaggcgacaaagacuuuaagaaaggaaugaacauguaccuaaccaaauuccaacagaaaaacgcagccaccgaagaccucugggaaagccucgaaaacgcaagcggcaaacccaucgcggccguaaugaauacauggaccaaacaaaugggcuucccacucaucuacguagaagcagaacaaguugaggacgaucgccuccucagacucucucaaaagaaauuuugugccggcgggagcuacguuggggaagacugcccccaauggaugguccccaucaccauaucaaccuccgaagacccaaaccaagcuaaacucaaaaucuuaauggacaagccagaaaugaacguaguccucaaaaacguaaaaccagaccaaugggucaaacuaaaccuaggcacagucggguucuaucgaacccaauacucaucugcaaugcuagaaucacuacuccccggcaucagagacuuaagccucccacccguagaccgucucggccuacaaaacgaccuguucucccuagccagagcgggcauaaucagcacggucgaggugcucaaagugauggaagcauucguaaaugagcccaacuacacaguaugguccgaccuaagcugcaaccucggcauccuuagcacacuacucucacacaccgacuucuacgaggaaauacaggaguucguaaaagacgucuuuagccccauaggcgaacgccuuggcugggaccccaagcccggggaaggccaccuagacgcacuacugcgcggacucgucuuagggaaacuuggaaaagcaggccacaaggcaacccucgaagaagccagacgcagauucaaagaccacguagaagggaaacaaauccuauccgccgaccuccgcucccccgucuaucucaccguccuaaagcacggagacggcaccacucuagacaucaugcuuaagcuccacaaacaggcagacaugcaagaagagaaaaacaggauugaaagaguacugggugcuacacuguuacccgaccucauacaaaaaguauugaccuuugcacucuccgaagaaguacgaccccaagacaccgucuccgucauagggggcgucgcuggcggaagcaaacacggccggaaagccgcauggaaauuuaucaaagacaacugggaggaacuauacaaccgguaccaaggcggauuccucaucucccgacuaauaaaacucaguguugaaggauucgccgucgacaaaauggcaggcgaagucaaggcuuucuucgaaucacacccagcccccagugccgaacgaaccauccaacagugcugcgagaacauacuucuaaacgcagcauggcucaaacgcgacgcagaauccauacaccaauaccuccuucagaggaaagcaucaccaccaacagucuag

SEQ ID NO: 4447 - RNA, 660 nt, Artificial Sequence
  AAH65513 variant
augcugcgcgcgggcgcgcccacgggcgaucuaccgcgcgcgggcgagguacauaccgggaccacgaucauggccguggaauuugacgggggcguagucaugggcucggacucgcgagugagcgcgggagaggccgugguaaaccgcguguucgauaaacugagcccacuccacgaaaggaucuauugcgcgcuaucgggaucggccgcggacgcgcaagcggucgcggacauggcagcguaccagcuagagcuccauggcauagaacuagaggaaccaccgcucgugcucgcggccgcgaacguggucaggaacauaagcuauaaauaucgcgaggaccugagcgcgcacuugaugguggccggaugggaucaaagggaagggggccaggucuauggcacacucggagguaugcuaacgcgacagcccuuugccauaggcgggagcgggagcacguucauauacggguacguggacgcagccuauaaaccgggcaugagcccggaagagugcaggagauuuaccacggacgcgaucgcgcucgcgaugucgcgcgauggcucgagcgggggcguaaucuaucucgugaccauaaccgcggccggggucgaccacaggguaauacucgggaacgagcucccgaaauucuacgaugaauag

SEQ ID NO: 4448 - RNA, 345 nt, Artificial Sequence
  EAW82312 variant
auggccggccucgcccuccaacccggcaccgcccuccucugcuacuccugcaaagcccaagucuccaacgaagacugccuccaagucgaaaacugcacccaacucggcgaacaaugcuggaccgcccgcauccgcgccgucggccuccucaccgucaucuccaaaggcugcucccucaacugcgucgacgacucccaagacuacuacgucggcaaaaaaaacaucaccugcugcgacaccgaccucugcaacgccuccggcgcccacgcccuccaacccgccgccgccauccucgcccuccuccccgcccucggccuccuccucuggggccccggccaacucuaa

SEQ ID NO: 4449 - RNA, 372 nt, Artificial Sequence
  AAC39607 variant
augaaagccguccuccucgcccuccucauggccggccucgcccuacaacccggcaccgcccuccuaugcuacuccugcaaagcccaagucuccaacgaagacugccuccaagucgaaaacugcacccaacucggcgaacaaugcuggaccgcccgaauccgcgccgucggccuucucacagucaucuccaaaggcugcucccuaaacugcgucgacgacucccaagacuacuacgucggcaaaaaaaacaucaccugcugcgacaccgaccucugcaacgccuccggcgcccacgcccuccaacccgccgccgccauccucgcccuccuccccgcccucggccuccuccucuggggccccggccaacucuaa

SEQ ID NO: 4450 - RNA, 963 nt, Artificial Sequence
  AAG40776 variant
augagcucaugcaacuucacccacgccaccuucguccuaaucggcaucccaggacucgaaaaagcccacuucuggguaggcuucccccuacuuuccauguacguagucgccauguucggaaacugcaucgucgucuucaucguccgcacagaacgcucccuucacgcaccaauguaucucuuccucugcaugcuggccgccauagaccuugcccucuccacuagcaccaugcccaaaauccucgcccucuucugguucgacucgcgcgaaaucuccuucgaagccugccucacccaaauguucuucauccacgcccucuccgcaaucgaauccacuauacuccucgccauggccuucgaccgauacgucgccauaugccacccccuccgccacgccgccguccucaacaacacagucaccgcccaaaucggcaucgucgccgucguacgcggaucacucuucuuuuucccccucccacuacucauaaaacgucucgccuucugccacuccaacguccucucccacucauacugcguccaccaagacguaaugaaacucgccuaugcagacacccuacccaaugucgucuacggccuuaccgccauucuccucguaaugggagucgacgucauguucauuucccucuccuauuuccucaucauccgcaccguccuccaacuccccuccaagucugaacgugccaaagcauucggaaccugcgucucccacaucggcgucguacucgccuucuacgucccccucaucggccucucuguaguccaccgcuucggcaacucacuccaccccaucguccgcgucgucaugggagacauauaccuucuccucccucccguaaucaaccccaucaucuacggcgccaaaaccaaacaaauccgcacccgcguccucgccauguucaaaaucucaugcgacaaagaccuccaagcgguaggcggcaaauaa

SEQ ID NO: 4451 - RNA, 2253 nt, Artificial Sequence
  AAA60209 variant
auguggaaccuccuccacgagacagacagcgccgucgccacagcacgccggccccgguggcucugugccggggcccucguccuagccggcggauucuuccuccuagguuuccucuucggaugguucauaaaaagcagcaacgaagcaaccaacaucacacccaaacacaacaugaaagcauuccuagacgaacugaaagcagaaaacauaaagaaauucuuauacaacuucacgcaaaucccgcaccucgccggaacagaacaaaacuuucaacucgccaaacaaauacaaucccaauggaaagaauuuggccuugacuccguugaacucgcccacuacgauguucugcucucauacccaaacaagacacaccccaauuacaucucaaucauaaacgaagacggaaacgaaauauucaauaccagccuauucgagcccccaccaccaggcuacgaaaacgucuccgacaucgucccacccuucuccgcguucucaccccaaggaaugccagaaggcgaccucgucuacgucaauuacgccagaaccgaggacuucuucaaacuugaacgggacaugaaaauaaauugcucaggcaaaaucgucauagcucgauacgggaaaguauucagaggcaauaaagucaaaaacgcacaacuggccggggcgaaaggagucauacuguacagcgaccccgcggacuacuucgccccaggcguaaaaucauacccagacggcuggaaccuacccggcggcggcguucaacgaggcaacauccuuaaccucaacggagccggagacccccucacgccuggcuacccagccaacgaauacgccuaccgccgagguaucgcagaagcggucggacuacccuccauccccguccacccaaucggcuacuaugacgcccagaaacuccucgagaaaaugggagggucagccccuccagacuccucauggcgcgguucccuaaaaguacccuauaacguaggccccggcuuuacaggaaacuucuccacucaaaaaguaaaaaugcacauccacuccaccaacgaagucacacguauauacaacgucaucggcacccuccgaggugcugucgaacccgaccgauacgugauccuaggaggacaccgcgacucauggguuuucgggggcaucgacccccaauccggcgcggccgucguucacgaaaucguccgcucauucggcacccucaagaaagagggcuggcgcccccgacgcaccauccuauucgcuuccugggacgcagaagaguucggacuccuaggaagcacagaaugggcagaggaaaacucccgucuacuacaggaacgaggaguugccuacauuaacgccgacagcuccauagaaggaaacuacacccuacgcgucgacugcacaccccucauguauucccuaguccacaaucuaaccaaagagcucaaaagccccgacgagggauucgaaggcaaaagccucuacgaaucuuggaccaaaaaguccccaucccccgaguucuccggcaugccgagaaucuccaaacucgguucagguaacgacuucgaagucuucuuccaacgacuaggcaucgccucuggacgcgcccgcuauaccaaaaacugggaaacaaacaaauucucaggauacccccucuaccacuccgucuaugaaacguacgaacugguagaaaaauucuacgaccccauguuuaaguaccaccucacaguagcucaaguccgcggcggcauggucuucgaacuggccaacuccaucguucucccauucgacugucgcgacuacgccguaguacucagaaaauacgccgacaagaucuacaguauaucuaugaaacacccccaagaaaugaaaacauacucagucagcuucgauagccuuuucagcgccgucaaaaacuucaccgaaaucgcaucaaaauucuccgaacgccuccaagauuucgacaagucaaaucccauuguacuccgcaugaugaacgaccaacugauguuccuagaacgcgcauucauagacccccuuggacuccccgaccgucccuucuaccggcacguuaucuacgcgccauccucccacaauaaguacgccggcgaauccuucccgggaaucuacgacgcacuguuugauauagaaagcaaagucgaucccuccaaggcuuggggagaagucaaacgccaaaucuacgucgcagccuucaccguacaagccgcagccgaaacccuaucagaagucgccuaa

SEQ ID NO: 4452 - RNA, 3921 nt, Artificial Sequence
  CCDS1397.2 variant
augaccauguaccucuggcuaaaacugcuagcguucggauuugccuuucuagacaccgagguauucguaacgggccaaucccccacgcccucgcccacgggcuugacaacagcuaaaaugccguccguaccacucucuucagacccccucccgacacacaccaccgccuuuaguccagcuuccacauuugaacgcgaaaacgacuuuuccgaaaccacgacgucacucagccccgauaacacauccacccaggugucucccgacucccucgacaacgcaucagcauucaacaccaccggaguauccucaguacagaccccgcaccuccccacucacgccgacucacaaacacccucagccggcaccgacacccagacuuucuccggaagcgcagccaacgccaagcucaacccuacuccugguuccaacgcuaucucagacgucccgggagagcgaucaacagcgucaacuuuuccaaccgacccgguuagcccucucacgaccacccuaucgcuagcacaccacagcucagccgcgcuaccggcacgcaccuccaacaccacaauuaccgcuaacacauccgacgccuaccucaacgccuccgaaacaacuacacucucccccucagggucagccguaauuuccacgaccacuaucgccaccacacccuccaaacccaccugugacgagaaauacgcaaacauaaccgucgacuaccucuauaacaaagagaccaaacuuuucaccgccaaacucaaugucaacgaaaauguagagugcggaaacaacaccuguaccaacaacgagguccacaaccuaaccgaaugcaagaacgccucgguauccaucucucauaauucauguaccgcgccagacaagacucucauccuugaugugcccccuggggucgaaaaguuccaacuacaugacugcacacaagucgaaaaagccgacaccacaaucugccucaaauggaaaaacauagaaaccuucacgugcgacacacagaacaucacuuacagguuccaaugcgggaacaugaucuucgacaacaaagaaauuaaacucgaaaaccucgaaccugaacacgaguacaagugcgacuccgaaauccucuacaauaaccacaaauucaccaacgccagcaaaauaaucaaaacggacuucggcagcccaggugaaccgcaaauaaucuucugcagauccgaagcagcccaccagggcguaaucaccuggaacccaccccagcguagcuuucacaacuucacccucuguuacauaaaagagacggaaaaagacugccuuaaccucgacaaaaaccucaucaaguacgaccuccaaaaucucaagccauauaccaaauacguacucagccuccacgccuacaucauagcgaaagugcaacgaaacggaagcgcagccaugugccauuucacgaccaaaucugcgcccccaucacaagucuggaauaugaccgucuccaugaccucagacaacucgaugcacgucaaaugucgaccaccccgagaccgcaacggcccccacgaacgauaccaccuagaagucgaagccggaaacacccuaguacgcaacgaaucccacaagaacugcgauuuccguguaaaagaccuccaauauagcaccgacuacacauucaaggccuacuuucauaauggugacuaccccggcgaacccuuuauccuacaccauagcaccucguacaacagcaaagcacucauugcguuccuagcauuccuuaucauaguaacaucaaucgcauuacucgucguacuauacaagaucuacgaccuccacaaaaagcgcuccuguaaccucgacgaacaacaagaacucguugagcgagacgaugaaaaacaacucaugaaugucgagccaauacacgccgacauccuccuagaaacauacaaaagaaaaaucgccgacgaaggccgacuauuccuagcugaguuccaaaguauaccccgcguguucucgaaauucccgauuaaagaagcccgcaaaccauucaaccaaaacaaaaaucgauacguagacauccuccccuacgacuacaaccgcgucgagcucagcgaaauaaacggcgacgcaggauccaacuacauaaaugccucguacaucgacggcuucaaagaaccgcgcaaguauaucgccgcgcaaggcccgcgcgacgaaacuguagacgauuucuggcggaugaucugggaacaaaaggcuaccguuaucgugaugguaacccguugcgaagagggaaaccgcaauaagugcgcugaauauuggccgagcauggaagaagguacgcgcgccuucggagacgucgucgucaagauaaaccagcacaagcgcugucccgacuacauaauucaaaagcucaauauagucaacaagaaagaaaaagccacagggagagaagucacccacauccaguuuacaucauggcccgaccacggcgucccagaagacccacaccuccuucucaaauugagacgacgcguaaacgccuucucaaacuucuucagcggccccauugucguacauugcuccgcgggcgugggacguacaggaaccuacauaggcaucgaugccaugcucgaaggccucgaagcagaaaauaaaguugacguauauggguacguaguaaaacuccggagacaacgcugccucaugguucaaguagaggcucaguacauccuuauccaccaagcccuaguagaauacaaccaauucggcgaaaccgaggucaaccuaagcgaacuccacccauaccuccacaacaugaaaaagcgggacccaccguccgaaccauccccuuuagaagccgaauuucaaagacuuccaucauaccgaucguggaggacccagcacauaggcaaccaagaagaaaacaagagcaaaaaccgaaacucgaacgugauaccguaugacuauaaccgagucccacuaaaacaugaacuagaaaugagcaaagaaagcgaacaugacuccgacgaauccagcgacgacgacucggauagcgaagaaccauccaaauacaucaaugcaucguucaucaugucauacuggaaacccgaggucaugaucgcggcccagggaccccuuaaggagaccaucggagacuuuuggcaaaugaucuuccaaagaaaagugaaagucauagucaugcucacggagcucaaacacggagaccaagaaaucugcgcccaguacuggggugaagggaaacaaacauauggggauaucgaggucgaccucaaagacaccgacaaauccucaacuuacacgcuacgaguguucgaguuacgacacucuaaaaggaaggauagccggacggucuaccaauaccaauacaccaacuggaguguagaacagcucccugcggagcccaaagaacuaaucucaaugauacagguggucaaacaaaaauugccccagaaaaacuccucagagggaaacaaacaucacaagagcaccccauuacucauacacugcagagacggcucccaacaaaccgguauuuucugcgcucuccucaaccuacuugagagcgccgagaccgaagaagucgucgacauauuccagguagucaaggcacugaggaaggcacgccccggcauggucuccaccuucgagcaguaucaguuccucuacgauguaauagccucaaccuaccccgcccaaaauggccaagucaagaaaaacaaccaucaagaagacaagauugaguucgacaacgaaguagacaaaguaaagcaagacgcaaacugcgucaacccccucggcgccccagaaaaacuaccagaagcaaaagaacaagccgagggaucggaaccgacauccgggacagaagggccugagcacucaguaaacggcccagccagccccgcccucaaccagggaucauaa

SEQ ID NO: 4453 - RNA, 624 nt, Artificial Sequence
  AAH02977 variant
auggcgaaaacguacgauuaccuguucaagcuccugcucauaggcgacagcggggucgggaaaacgugcguacuauuccgcuucagcgaggacgcguucaacagcacguucauaagcacgauaggaaucgacuucaagaucagaaccauagaacuggacgggaaaagaaucaagcuccagaucugggacacggccgggcaagagcgcuuccgcacgaucacgaccgcguacuaccgcggggccaugggaauaaugcuggucuacgacauaaccaacgaaaagagcuucgacaacaucaggaacuggaucaggaacauagaagaacacgcgagcgcagacguggagaaaaugauacucgggaacaagugcgacgucaacgacaagcgccaggucucgaaagagcgcggagaaaagcuagcgcuagauuacggaaucaaguucauggaaacgagcgcgaaagcgaacauaaacguggaaaacgccuucuucacgcucgcgcgcgacaucaaggccaagauggacaaaaagcucgagggcaacagcccgcaagggagcaaucaaggggucaagaucacgcccgaccaacagaaaaggagcucauucuuccgcugcguccugcucuag

SEQ ID NO: 4454 - RNA, 1260 nt, Artificial Sequence
  BAA81688 variant
augaaaaauuacaaagccauagguaaaauaggcgaaggcaccuucucggaagucaugaaaaugcaaucacuacgcgacggcaacuacuacgcaugcaaacaaaugaagcaaagauucgaaucaaucgaacaagucaacaaccuccgcgaaauccaagcccuacggcgacuaaacccccaccccaacauccucaugcuucacgaaguaguauucgaccgaaaaagcggcucccuagcccucaucugcgaacuaauggacaugaacaucuacgaacuaauaagaggacgccgcuacccauuaagcgaaaagaaaaucaugcacuacauguaccaacucugcaaaucccucgaccacauacaccgcaacggcaucuuccaccgcgacgucaaacccgaaaacauccucaucaaacaagacguucucaaacucggcgacuucggcuccugcagaagcguauacuccaaacaacccuacaccgaauacaucucaacacgaugguaucgcgcccccgagugccuacucaccgacggcuucuacacguacaaaauggaccucugguccgcaggcugcgucuucuacgaaaucgccucccuccaaccccucuucccaggcguaaacgaacuugaccaaaucuccaaaauccacgacgucaucggaacucccgcacagaaaauacucaccaaauucaaacaaucccgggccaugaacuucgacuucccauucaagaagggcuccggcaucccccuccucaccaccaaccucagcccccaaugccuaucccuccuacacgccaugguagccuacgaccccgacgaacgcaucgccgcccaccaagcacuucaacaccccuacuuccaggaacaacgcaaaaccgaaaaacgcgcacucggcucacaccgcaaagccggcuuucccgaacaccccgucgcccccgaaccccucuccaacuccugccaaaucucaaaagaaggacgcaagcaaaaacaaucccucaaacaagaagaagaccgccccaaacgccgcggccccgcauacgucauggaacuacccaaacucaaacuaucaggagucgucaggcucucguccuacuccucacccacccuccaaucaguucuaggauccggaacaaacggccgagucccaguccuccgaccccucaaaugcaucccagcauccaagaaaacagacccacaaaaagaccuaaaacccgcaccccaacaaugccgccuacccaccaucguacgcaaaggcggccgcuaa

SEQ ID NO: 4455 - RNA, 1389 nt, Artificial Sequence
  AAH08727 variant
auggcuuccaacuccuccuccugccccacccccgggggaggccaccucaacggcuacccagucccccccuacgcguuuuucuuccccccaaugcucggcggccuaagcccccccggcgcccucaccacccuacaacaccaacuaccagucuccggcuacucuacccccucccccgcaaccaucgaaacacaauccucauccuccgaagaaauaguacccagcccccccagcccccccccccuuccacgcauuuacaaaccaugcuucgucugccaagauaaauccuccggguaccacuacggaguauccgccugugaagguugcaaaggcuucuuccgaagaucaauccaaaaaaacaugguguacacgugccaccgagacaaaaacugcaucaucaacaaagugacccgcaaccgaugccaauacugccgccuacaaaaaugcuucgaagucggaaugucaaaagaaucaguacgcaacgaccgcaacaaaaaaaaaaaagaaguccccaaaccagagugcuccgaaucuuacacccucacccccgaagucggcgaacucauagaaaaaguacguaaagcgcaccaagaaaccuuccccgcccuuugccaacucgguaaauacacuacaaacaacucauccgaacaacgcgucucccucgacauagaccucugggacaaauucucagaacuauccaccaaaugcauuaucaaaaccgucgaauucgccaaacaacucccaggcuucacaacccucaccaucgccgaccaaaucacccuacucaaagccgccugccuagacauccugauccuccguauaugcacccgcuauacccccgaacaagacacuaugaccuucucagacggacuuacccucaaccgaacacaaaugcacaacgcaggauucggcccacugacugaccuuguuuucgccuucgccaaccaacuccucccccucgaaauggacgacgccgaaaccggccuccucucagccauaugccucaucugcggcgaccgccaagaccucgaacaaccagacagagucgacaugcuccaagaaccccuccucgaagcccucaaagucuacguacgcaagcgccgacccucccgaccucacauguuucccaaaaugcucaugaaaaucaccgaccuucgaucaaucuccgcaaaaggcgcggagcgagucaucacccuaaaaauggaaauccccggcucaaugccaccccuuauccaagaaaugcucgagaauucagaaggccuagauacccuauccggccaaccagguggcggaggucgcgacggcggcggccuggcacccccaccaggcuccugcucccccucccucucaccauccuccaacagauccagccccgccacgcacucccccuaa

SEQ ID NO: 4456 - RNA, 570 nt, Artificial Sequence
  AAB02605 variant
augaccgaauacaaacuagucgucgucggcgccggcggagucggcaaauccgcacucaccauccaacucauccaaaaccacuucgucgacgaauacgaccccaccauugaagacucauaccgaaaacaagucgucaucgacggcgaaaccugccuacucgacauccucgacaccgccggacaagaagaauacuccgccaugcgcgaccaauacaugcgcaccggcgaaggcuuccucugcgucuucgcaauaaacaacaccaaauccuucgaagacauccaccaauaccgagaacaaaucaaacgcgucaaagacuccgacgacguccccaugguccucguaggcaacaaaugcgaccucgccgcccgcaccgucgaaucacgccaagcacaagaccucgcccgcuccuauggcauccccuacaucgaaaccuccgcaaaaacccgacaaggcgucgaagacgccuucuacacccuuguccgcgaaauccgccaacacaaacuccgcaaacucaacccccccgacgaauccggccccggcugcaugucaugcaaaugcguccucucauaa

SEQ ID NO: 4457 - RNA, 570 nt, Artificial Sequence
  AAB59445 variant
augaccgaauacaaacucgucgucgucggcgccggcggcgucggcaaauccgcccugaccauacaacuaauccaaaaccacuucgucgacgaauacgaccccaccaucgaagacuccuaccgcaaacaagucguaaucgacggcgaaaccugccuccuagacauccuagacacagcaggccaagaagaauacuccgccaugcgcgaccaauacaugcgaaccggagaaggcuuccucugcgucuucgccaucaacaacaccaaauccuucgaagacauacaccacuaccgagaacaaauaaaacgcgucaaagacuccgaagacguccccaugguccucgucggcaacaaaugcgaccucccaucccgcaccguggacaccaaacaagcccaagaccuggcccgauccuacggcauccccuucaucgagaccuccgccaaaacccgccaacgcgucgaagacgccuucuacacccuaguccgcgaaauccgccaauaccgccucaaaaaaaucuccaaagaagaaaaaacccccggcugcgucaaaauaaaaaagugcaucaucauguaa

SEQ ID NO: 4458 - RNA, 570 nt, Artificial Sequence
  AAA60255 variant
augacggaauacaaacuggucgugguaggggccggaggcgugggaaagagcgcgcucacaauccagcuaauacaaaaccacuucgucgacgaauacgacccgaccauagaagacagcuaccgcaagcaaguggucauagacggggaaacgugccugcucgacauccuagacacggccggacaagaggaauacagcgcgaugagggaccaguacaugcgcacgggagagggcuuccucugcgucuucgccauaaacaacagcaagagcuucgccgacaucaaccuauaccgcgaacaaauaaaaagggucaaggacucggacgacgucccgauggugcucgugggcaacaaaugcgaccugcccacgcgcacggucgacaccaaacaagcgcacgagcucgcgaaaucguacggaaucccguucauagaaacgagcgcaaaaacgcgccagggcguggaagacgccuucuacacgcucgugcgagagaucaggcaauaccgcaugaaaaagcucaacagcucggacgacggcacgcaagggugcaugggccugccaugcgucguaauguag

SEQ ID NO: 4459 - RNA, 546 nt, Artificial Sequence
  AAB84001 variant
augugcaaaggccucgccgcccucccccacagcugccucgaacgcgccaaagaaaucaagaucaaacucggcauccuccuccaaaaacccgacuccgucggcgaccucgucauccccuacaacgaaaaacccgaaaaacccgccaaaacccaaaaaaccucccucgacgaagcccuccaauggcgcgacucccucgacaaacuccuccaaaacaacuacggccucgccuccuucaaaucauuccuaaaaucagaauucuccgaagaaaaccucgaauucuggaucgccugcgaagacuacaaaaaaaucaaaucccccgccaaaauggccgaaaaagccaaacaaaucuacgaagaauucauccaaaccgaagccccaaaagaagucaacaucgaccacuucaccaaagacaucacaaugaaaaaccucgucgaacccagccucagcuccuucgacauggcccaaaaacgcauccacgcgcucauggaaaaagacucccucccccgcuucguccgcagcgaauucuaccaagaacuaauaaaauaa

SEQ ID NO: 4460 - RNA, 2175 nt, Artificial Sequence
  CCDS4362.1 variant
augucauucccaaaagcgccacucaaacgauucaacgaccccagcggcugcgcaccaucccccggcgcauacgacguaaagacccuagaagugcuaaaaggaccggucagcuuccaaaagucccaacgauucaagcaacaaaaagagaguaagcaaaaccuaaacgucgacaaagacacaacacuaccagcaagcgccagaaaaguaaaaagcagcgagagcaaagaaagccagaaaaacgacaaagaccucaaaauccucgagaaggaaauacgugugcuacuucaagaacgaggcgcgcaagaccgacgcauucaagaccuggaaacagaacuagagaaaauggaagcacggcuaaacgccgcccucagggaaaagacgagccuaagcgcgaacaacgcgacgcucgaaaaacaacucaucgaacuaacaaggacaaacgaauuacuaaaaagcaaauucucggaaaacggcaaccagaaaaaccuccgcauacucucgcuagaacuaaugaaacugcgaaacaaacgcgaaaccaagaugagagggaugauggccaaacaagagggaauggaaaugaaacuacaagucacacaacgcagccuagaggagagccaaggcaaaaucgcccaacuagaaggaaaacucgugagcauagagaaagagaaaauagacgagaaaagcgaaacggaaaaacuacucgaauacaucgaagaaaucagcugcgcaagcgaccaagucgaaaaauacaaacucgacauagcacaacuagaagaaaaccugaaagaaaagaacgacgaaauccucagccuaaaacagagcuuggaagagaacauagucauccucagcaaacaaguggaagaccugaacguaaagugccagcugcuggaaaaagaaaaggaagaccacgucaaccgcaaccgggaacauaacgaaaaccucaacgccgaaaugcaaaaccucaaacaaaaauucauccuagaacagcaagagcgcgagaaacuccagcaaaaagagcuccaaaucgacagccuccuacaacaagagaaagaacucagcagcagccuacaccaaaaacucugcagcuuccaagaagaaaugguuaaagaaaagaaccucuucgaagaggaacugaaacaaacucucgacgaacuagacaaacuccaacaaaaagaagaacaagcagaaagacucguaaaacagcucgaagaagaagccaaaagccgcgcagaagaacuaaagcugcuagaagaaaaacucaaaggaaaagaagcagaacuagagaaaagcagcgccgcgcacacccaggccacccuacuacugcaagaaaaauaugacuccaugguucaaucccucgaggacguaaccgcacaauucgagagcuacaaagcgcuaacagcgagcgaaaucgaggaccuuaaacuagaaaacagcagucuccaagaaaaagccgcaaaagcaggcaaaaacgcggaagacgugcaacaccaaauccuagcaaccgagucgagcaaccaagaauacgucagaaugcuccucgaccuacaaacaaaaagcgcccugaaagaaacagagauaaaagaaauaacagugucauuccuacagaagauaacggaccuccagaaccaacucaaacagcaagaagaggacuuccgaaaacaacuagaagacgaggagggacgaaaagccgagaaagaaaacacaacggcagagcuaaccgaagaaauaaacaaauggagacuccucuacgaagaacucuauaacaaaacgaaacccuuccaacuacaacuagacgcguucgaaguagaaaaacaagcacuccucaacgaacacggcgcagcccaggaacagcuaaacaaaauacgcgacagcuacgccaaacuccugggacaccagaaccuaaaacagaaaauaaaacacgucgucaaacucaaggacgagaacucccaacucaaaagcgaagugaguaagcucagaugccaacuagcaaagaagaaacagagcgagaccaaacuacaagaggaacugaacaaagugcuugggaucaaacacuucgaccccagcaaggcguuccaccacgaaucgaaagaaaacuucgcguugaaaacaccgcucaaggagggaaacaccaauugcuacagagcccccauggagugccaagagagcuggaaauag

SEQ ID NO: 4461 - RNA, 582 nt, Artificial Sequence
  AAC33179 variant
auggcagcgaucaggaaaaagcucgugaucgugggcgauggcgcaugcgggaaaacaugccugcucauagucuucagcaaggaccaguucccggaaguguacguacccacggucuucgaaaacuacauagccgacaucgaagucgacggcaaacaaguggaacuggcccugugggacacagcgggccaggaagacuacgaccgccuacgcccgcucucauacccggacacagacgugauccugaugugcuucucaaucgacagcccagacucacucgagaacauacccgagaaauggaccccggaagugaaacacuucugccccaacgucccgaucauacucgugggcaacaaaaaggaccugcgccaggacgagcacacgcgcagggaauuggccaagaugaagcaagagcccgugcgcucagaagagggcagggacauggccaaccgcauaagcgcguucggguaccuagaaugcagcgcgaaaacgaaagagggcgugcgcgaggucuucgaaauggccacgcgcgcgggccugcaagugcgcaagaacaagcgaaggcgcgggugcccgauccuguga

SEQ ID NO: 4462 - RNA, 888 nt, Artificial Sequence
  AAA36161 variant
augucaggcgcccuagacguacuccaaaugaaagaagaagacguccucaaauuccuugccgccggcacccaccucggaggaaccaaccucgacuuccaaauggaacaauacaucuacaaacgcaaaagcgacggcauauacauaaucaaccucaaacgaacaugggaaaaacugcuccuagccgcacgcgcaaucguagccauagaaaaccccgccgacgucagcguaaucucauccagaaacacaggccaacgcgccguccucaaauucgccgcagccacuggcgcaacaccaaucgcaggccgauucacccccggcaccuucaccaaccaaauacaagccgccuuccgcgaacccagacuacucgucguaacagacccaagagcagaccaccaaccccuaaccgaagccucauacguaaaccuccccacaaucgcccuaugcaacaccgacagcccccuccgauacgucgacaucgcaaucccaugcaacaacaaaggcgcacacuccgucggacucaugugguggaugcuagcaagagaagugcuccgcaugcgcggcaccaucucccgcgaacacccaugggaaguaaugcccgaccucuacuucuacagagaccccgaagaaaucgaaaaagaagaacaagccgccgcagaaaaagcagucaccaaagaagaauuucaaggcgaauggacagcccccgcccccgaguucaccgccacccagcccgaagucgcagacuggagcgaaggcguacaaguccccucagucccaauccagcaauuccccacagaagacuggucagcccaacccgcaaccgaagacuggagcgcagccccaaccgcccaagccaccgaauggguaggagccaccaccgacuggagcuaa

SEQ ID NO: 4463 - RNA, 2601 nt, Artificial Sequence
  AAH14614 variant
augaacggcgaacaacaacuagacgccgacgcaggcuccggcauggaagaagucgaacucaguugggaagauuacuuagaagaaaccggcagcacagcaguccccuacggcucauucaaacacguagauacacgccuacaaaacggguucgcacccggcaugaaacuagaagucgcaguccgcacagacccagagaccuacuggguagccaccguaauaacaaccugcgaacaacuacuacuccuccgguacgacggcuacggagaagaccggcgcgcggacuucuggugcgacauccgaaaagcagaccuguaccccauaggauggugcgagcaaaacaagaaaacccucgaagcgccggaggggauccgcgacaaaguauccgacugggaugaguucuugcgacaaacccucaucggagccugcucaccucccguaccccuccucgaaggccuccggaacggucguaacccccucgaccugaucgcacccggaagccgacuagaaugccaagcauuccaagacucccuaucgacguggaucguaacgguaguagaaaacauaggcggccggcuuaaacucagauacgaaggucuugaaucaucagacaacuaugaacacuggcucuacuaccuagaucccuuccuccaucacgucggcugggccgcccagcaaggguacgaacuccagccucccuccgccauacgccaccucaaaaacgaagccgaauggcaagaaauucuagccaagguaaaagaagaggaagaggaaccccuacccucauaccucuucaaagauaaacaagucauaggcauccacacauucucggucaacaugaaacucgaggcagucgacccaugguccccauucggcauaaguccagcgacagucgucaaaguauucgacgaaaaauacuuccuaguagaaauggacgaccuacgcccagagaaccacgcacgcagauccuucgucugccacgccgacucacccggcauauucccaguacaauggucccuaaagaacggccugcacauaucacccccgcccggcuaccccucccaagacuuugacugggccgacuaucucaagcaaugcggcgcggaagcagccccacaacgcugcuucccaccacuuauauccgaacacgaguucaaagagaacaugaaacucgaagcuguaaacccaauauuacccgaagagguaugcgucgccacaaucaccgcaguccgaggaagcuaccuauggcuacagcucgaaggcucaaagaaacccauccccgagugcauagucuccguagaaucaauggacauauucccucucggcuggugcgaaaccaauggccacccccuauccacgccccgucgugccagggucuacaaacaacgcaaaaucgccguaguccaaccagaaaaacagguaccuuccagccgaaccguacacgaaggccuccgaaaccaggaacuaaacagcaccgagucugucaugaucaacggaaaauauugcugcccaaaaauauacuucaaccaccgcugcuucuccgggccauaccucaacaaaggccgaaucgcagaguuaccccagugcguaggccccggaaacugcguccuuguccuacgagaaguacucacccuccuaauaaacgcagccuauaaaccaagccgaguccuucgcgaacuucaacuggacaaagacagcguauggcauggcugcggcgaaguacucaaagcaaaguacaagggcaaauccuacagagcaacaguggaaaucgucaaaacugcggacagaguuacggaguucugccgccaaaccugcaucaagcuggaaugcugcccaaaccucuucggaccccguauggugcucgauaaguguucugaaaacugcagcguccucacaaaaacaaaauacacacacuacuaugguaaaaagaaaaacaaacgcauagguagacccccaggaggccacuccaaccucgccugcgcacucaaaaaggccagcaaacgccgcaaaagacgcaaaaacguguucguccacaaaaagaaaagaagcagcgccagcgucgacaauacgccagccggauccccacaaggcagcggaggugaagacgaggacgaccccgacgaaggagacgacgacagccucucagaaggcucaaccagcgagcagcaagacgaacugcaagaagaaucagaaaugucugaaaagaaaagcugcaguucaagccccacccaauccgaaauaagcaccucacucccaccggaccgccagagacgcaaaagagagcuacgcacauucuccuucuccgacgacgaaaacaaaccaccaucacccaaagaaauccguaucgaaguggcagaacgccugcaccucgacucaaacccccucaaauggagcgucgcggacgucguccgcuuuauacgaucuaccgauugcgcaccacucgcccgcaucuuccuagaccaagagauagacggacaagcacuacuucuacuaaccuugccaacuguccaagaaugcauggacuuaaaacucggacccgccaucaaacugugccaccacaucgaacgcauaaaauuugcauucuacgagcaauucgccaacuaa

SEQ ID NO: 4464 - RNA, 1431 nt, Artificial Sequence
  CCDS4550.1 variant
auguccggaagcagcgcaaggucaucacaccucagccaaccagucgugaaaagcguccuaguauacagaaacggggacccauucuacgcaggaaggagaguaguaauacacgaaaagaaagucagcagcuucgagguguuccucaaagaagucacagggggaguccaagccccguucggagccguucgaaacaucuauacaccacgaacaggacaccguauaagaaaacucgaccaaauacaaagcggcggaaacuacguagcgggcggccaggaagcauucaagaaauuaaacuaccuagacaucggcgaaaucaagaaaaggccaauggaaguaguaaacacagaaguuaaaccgguaauacacagccgaauaaacguaagcgcaagguuccgcaaaccgcuccaagaacccugcacaaucuuccugauagccaacggggaccuaauaaacccagcgucacgccuacuaauaccccgaaaaacacugaaccaaugggaccacguacugcaaaugguaaccgagaaaauaacccuaagaagcggagcgguacacagacucuacacacucgaaggaaaacucgucgaaagcggagcagaacucgagaacggccaauucuacguggccguaggccgcgacaaauucaagaaauuaccauacagcgaacuccucuucgacaaauccacaaugagacgccccuucgggcaaaaagcaagcagccuacccccgaucguaggcucccgaaagucaaaagggagcggaaacgacagacacagcaaaagcaccgucggcagcucagacaacaguuccccacaaccacucaaacggaaagggaaaaaggaagacguaaacucagaaaaacuaacaaaacuaaaacaaaacgugaaacucaaaaacagccaagaaacaauacccaacuccgacgaaggcauauucaaagccggcgccgaaagaagcgaaaccagaggggcagccgaaguacaagaagacgaagacacacaaguagagguaccagucgaccaacgaccagccgaaauaguagacgaagaggaagacggagaaaaagcaaacaaagacgcagagcaaaaagaggacuucagcgggaugaacggagaccuagaggaagagggagggcgcgaggccaccgacgcacccgaacagguagaagaaauacucgaccacagcgaacaacaagcaagaccagcccgagucaauggaggcacagacgaagaaaacggagaagaacuacaacaaguaaacaacgaacuacagcuaguacucgacaaagaaagaaaaagccaaggcgcaggauccggacaagacgaagcagacguagacccccaaagaccacccagacccgaagugaaaaucacaagcccggaagaaaacgaaaacaaccaacaaaacaaggacuacgcagcagucgccuaa

SEQ ID NO: 4465 - RNA, 1362 nt, Artificial Sequence
  BAA07903 variant
augcgcauccccguugacgccuccacuucacgccgcuucaccccucccuccaccgcccucucccccgguaaaaugucagaagcacucccacucggagcccccgaugccggcgccgcccucgccggaaaacuacgcucaggcgacagauccaugguugaaguccucgccgaccaccccggcgagcuaguacgaacagacucccccaacuuccucugcucaguccuuccaacacacuggcgcugcaacaaaacacuccccaucgccuucaaagucgucgcccuaggugacguaccugacggcacacucguaaccgucauggcaggaaacgacgaaaacuacuccgccgaacuccgaaaugcaaccgcagcaaugaaaaaccaagucgcccgcuucaacgaccuccgcuucgucggccguuccggacgcggcaaauccuucacccucacaaucaccgucuucacaaaucccccacaaguagccaccuaccaccgcgcaauuaaaaucacuguugacggcccccgcgaaccccgacgacaccgacaaaaacuagaugaccaaacaaaaccaggcucacuaucuuucucagaaagacucuccgaacucgaacaacuccgaagaacagccaugcgcguaucaccccaucaucccgcaccuacccccaacccccgcgccucccuaaaccacucaacagccuucaacccacaaccccaaucccaaaugcaagacacccgacagauccagccauccccacccugguccuacgaccaauccuaccaguaccuuggcucgaucgccucacccucagugcaccccgcuacccccaucucacccggccgcgccuccgguaugaccacacucucagccgaacucuccucccgccuauccacagcacccgaccucacagccuuuucagacccacgccaauuccccgcccuccccuccauaucugacccccgcaugcacuaccccggagcauucacuuacucccccacaccugucaccuccggcaucggcaucggcauguccgccaugggauccgccacccgcuaccacaccuaccuucccccacccuaccccggcuccucccaagcacaaggcggacccuuccaagccuccucccccucuuaccaucuauacuacggagccuccgcaggcuccuaccaauuuucaauggugggcggcgaacgcucacccccacgcauccuaccacccuguacuaacgcauccaccgguucagccuuacuaaaucccucccuuccaaaccaaucagacguugucgaggccgaaggcucacacucuaacucacccaccaacauggcccccuccgcccgccucgaagaagccgucuggcgccccuacuaa

SEQ ID NO: 4466 - RNA, 1080 nt, Artificial Sequence
  ACI46041 variant
augccccuggaacucgaacucugcccaggcagauggguaggcgggcaacaccccugcuucaucaucgccgaaaucggccaaaaccaccaaggagaccucgacgucgccaaacgcaugauccgaauggcaaaagaaugcggcgccgacugcgccaaauuccaaaagagcgaacucgaauucaaauucaaucgcaaagcccuagaacgaccauacaccagcaaacacagcuggggcaaaaccuacggagaacauaaacgccaccucgaauucucccacgaccaauaccgcgaacuacaacgcuacgccgaagaagucggcaucuucuucaccgccuccggcauggacgaaauggccguagaauuccuccacgaacuaaacguccccuucuucaaagucggcuccggcgacacaaacaacuucccauaccuagaaaaaaccgccaaaaagggacgaccaaugguaaucagcuccggcaugcaaagcauggacaccaugaaacaagucuaccaaaucgucaaaccccuaaaccccaacuucugcuuccuacaaugcaccucagcguacccccuucaacccgaagacgucaaccuccgcgucaucuccgaauaccaaaaacuauuccccgacauaccaaucggcuacuccggccacgaaaccggaaucgccaucagcguggcagcagucgcacuaggggccaaaguccucgaacgccacaucacccucgacaaaaccuggaaaggcuccgaccacucagccucacucgaaccaggcgaacucgccgaacucguacgcagcguacgccucgucgaacgcgcacucggaagcccaacaaaacaacuccuccccugcgaaauggccugcaacgaaaaacugggcaaauccgucgucgccaaaguaaaaaucccagaaggaaccauccuaaccauggacaugcuaacagucaaagucggcgaacccaaagccuacccccccgaagacaucuucaaccuaguaggcaaaaaaguccucgugacagucgaagaagacgacaccaucauggaagaacuagucgacaaccacggaaaaaaaauaaaauccuaa

SEQ ID NO: 4467 - RNA, 2715 nt, Artificial Sequence
  CCDS14652.1 variant
augcaagccucaccccugcaaacaucccaacccacucccccagaagaacuacacgcagcagccuacgucuucaccaacgacggccaacaaaugcgaucagacgaagucaaccuggucgccacgggccaccaauccaagaagaaacacucccgaaaaagcaaacggcauuccucguccaaacgccgcaaauccaugucauccuggcucgacaaacaagaagacgccgcagucacgcacuccaucugcgaagaacgaaucaacaacggacaaccaguagcagacaacguccucucaaccgcaccacccuggcccgaugccaccauugcccacaauauacgagaggagcgaauggaaaacgggcaaagccgcaccgacaaaguacucuccacagcaccuccacaacucguacacauggccgccgccgguauccccucaaugagcacccgagaccuucacuccaccguaacacacaacauccgugaagaacgcauggaaaacggccaaccccagcccgacaacguucuuagcacaggacccaccggccuuauaaacauggccgccacccccauccccgccaugagcgcccgcgaccucuacgcaacaguaacucauaacguuugugaacagaaaauggagaacguacaaccagcccccgacaacguccuccucacucuacgcccgagacgcaucaauaugacagacaccgggauauccccaaugucaaccagagaccccuacgcaacaauaacauacaacgucccggaagagaaaauggaaaaaggacaaccacaacccgacaacauccuguccaccgccaguaccggccuaauaaacgucgcaggagccggcacccccgccaucagcaccaacggccuauacucuaccguaccccacaacgucugcgaagagaaaauggaaaaugaccaaccacaaccaaauaacguccucuccaccguccaaccaguaauuauauacuuaacagcgaccggcauccccgggaugaacacgcgcgaccaauacgccacaaucacccacaacguaugcgaagaacgagucguuaacaaucaaccacucccaucaaacgcccuauccacuguacuuccaggcuuagcauaccuagccaccgccgacaugcccgccauguccacacgagaucaacacgccacuaucauacacaaccuacgcgaagagaaaaaggauaacucccaaccaacacccgacaacguacucucugccgucacacccgaacuaauaaaccucgcaggcgcgggcauaccgcccauguccaccagagaccaauacgccacuguaaaccaccacguacacgaagcccgcauggaaaacggacaacgaaaacaagacaacguccuuucaaacguacucucuggacucaucaauauggcgggugcaagcauacccgccauguccucacgagaccuauacgccacaaucacccacuccguacgcgaggagaaaauggaauccggcaaaccacaaacagacaaagucauauccaacgacgcgccccaacuaggccacauggcagccggaggaauccccagcaugagcacaaaagaccucuaugccaccguaacacaaaacguacaugaagaaaggauggaaaacaaucaaccccaaccauccuacgaccucagcaccguucuaccaggccucacguaccucacagucgcuggcauacccgccaugucaacacgcgaccaauacgcuaccgucacccacaacguacacgaagagaaaaucaaaaauggccaagccgccuccgauaacgucuucuccaccgucccacccgccuucaucaacauggcagcaaccggcgucuccuccauguccacacgcgaccaauaugccgccgugacccauaacauccgugaagagaaaaucaacaacucccagcccgcgcccggaaacauucucuccaccgcuccacccugguuaagacauauggccgccgccgguaucucaagcacaaucacuagagaccuauacguaaccgcaacccacucaguccacgaagagaaaaugaccaacggacaacaagcacccgacaacucgcucucgaccguaccacccggaugcaucaaccucuccggcgccggcauaucuuguaggucaacgcgcgaccuauacgccaccguaauacaugauauccaggaagaagaaauggaaaacgaccaaacuccacccgacggauuucuaucgaacucagacucccccgaauuaaucaacaugaccggacacuguaugccucccaaugcgcucgacucauucucccaugacuuuacuucacuguccaaagacgaacuccucuacaaacccgauagcaacgaguucgccgucggaaccaaaaacuacagugucagcgcuggagacccacccguaacaguuaugucacuugucgaaacgguaccgaacacaccccaaauaucuccagcgauggcaaagaaaauuaacgacgauauaaaauaccaacucaugaaagaaguccgccgauuuggccaaaacuacgaacgaauauucauauuacuugaagaaguacaagguuccaugaaagugaaacgacaguucgucgaguucacaaucaaagaagccgcccgcuucaaaaaggucguacucauccaacaacuggaaaaagcccucaaagaaauagacucccacugucaucuacgcaaaguaaaacacaugcggaaacgcuaa

SEQ ID NO: 4468 - RNA, 2403 nt, Artificial Sequence
  AAH01058 variant
auggggagcaguaagaaacacagaggagagaaggaggcagcgggaacgacggcggcagcgggaacaggaggcgcaaccgaacaaccaccaaggcacagagagcacaagaaacacaaacaccggagcggcggaagcgguggcagcggaggagagagaaggaagaggagccgcgagagagggggugagagaggaagcgggaggagaggggcagaggcagaggcaagaaguagcacacacggacgagaacgcagccaagcggagccaagcgagcggaggguaaagagggagaaacgggacgauggauaugaagcagcagcaagcucgaagacgagcucgggggacgcgagcagcuuaagcauagaggagacaaacaagcugagggcgaaacugggccugaaaccacucgagguuaacgccaucaaaaaggaggcggggacgaaggaggagccggugacagccgacgugauaaacccgauggcacuacggcaaagggaggaacugagagaaaagcuagcggcggcaaaagagaagaggcuccuaaaucaaaaacugggaaaaauaaagacacugggggaggacgauccauggcucgacgauacugccgccuggauagaaagaagccggcaacuacagaaagaaaaggaucuggcagagaaaagggcgaagcugcuagaggaaauggaccaggaguucgggguaucgacacugguagaggaggaguuugggcaaaggagacaggaccuguacagugcgagagaccugcaaggccuaacaguagaacacgcaauagauagcuucagagaaggcgagacaaugauauugacgcuuaaagauaagggaguacuacaggaggaagaggacgugcuagugaacgugaaccuaguagacaaagagagagcggaaaagaacguagagcugagaaagaagaaaccagacuaccuccccuaugcggaggacgagagcguggacgaccuagcgcaacagaaaccgcgaaguauucuaucaaaguacgacgaggaacuagagggggagaggccgcacagcuucaggcuagagcaagggggaaccgcggacggauugcgggagagagagcuagaggagauaagagcaaaacugagacugcaagcacagagucugucgacggugggaccaagauuggcaagcgaauacuuaacgccagaggagaugguaacguucaagaaaacgaaaagaagaguaaagaagauaagaaagaaagaaaaagaagugguaguacgagcagacgaccuccugccgcuaggagaccagacgcaagacggagacuucggaagcagguuacgggggagggggagaaggaggguaagcgaaguagaggaagagaaggaaccagugccacaaccacucccgagcgacgacacgaggguagaaaacauggacaucagcgacgaggaagagggaggugcaccaccuccaggcagcccacaaguguuagaagaggacgaagcggagcuagaacuccaaaagcagcucgagaagggaagaaggcugagacaacuacagcaacuacagcaauugagagauucgggcgaaaaggucguagaaauuguaaagaaacuugagucaaggcaaaggggaugggaggaggacgaggacccagaacgaaaaggggcaauaguguucaacgcaaccagcgaguucugcagaacgcuaggagaaaucccgacuuacggauuagcggggaacagagaggaacaagaggaacuaauggacuuugaaagggacgaagaaaggagcgcgaacggagggagcgaaagcgacggggaagagaacauaggguggagcacagugaaccucgacgaagagaaacagcaacaggacuucagcgcgagcagcacgacaauacuggaugaagaaccgauagugaacagagggcuggcagcggccuugcuacugugccaaaacaagggcuugcuggagacgacgguacagaaaguggccaggguaaaggcaccaaacaagagccugccaagugccguauauugcauagaggacaaaauggcaaucgaugacaaguacaguaggagagaagaauacaggggauucacacaagacuucaaagagaaggacggguacaaaccggacguaaagauagaauacguggacgaaacaggacggaaacuaacaccgaaagaagcauuccgccagcuaagucacagguuccacggaaaggggagcgguaagaugaagacggagcgcaggaugaagaaacuggacgaagaggcgcuauuaaagaaaaugaguagcagugacacgccauuaggaacgguggcguugcugcaagagaaacaaaaagcgcagaaaacaccauacauagugcugagcggcagcggaaagucaaugaacgcaaacacuauaacaaaguga

SEQ ID NO: 4469 - RNA, 2877 nt, Artificial Sequence
  AAF00087 variant
augcguacccauacacguggcgcccccuccgucuucuucauauaccuccuaugcuucgucuccgcuuacaucaccgaugagaacccagaagucaugaucccauucaccaacgccaacuacgacucccaccccaugcuauauuucucccgcgccgaaguggccgaacuucagcuucgcgccgcauccucccacgagcacauagccgcccgccugaccgaggcaguacacaccaugcuauccucaccccucgaauaccuaccgccaugggacccuaaagacuacuccgcacgauggaaugaaauuuucggcaacaaccucggagcccuugcuauguuuugcguccuguaccccgaaaacaucgaagcacgcgacauggcuaaagacuacauggaacgcauggcugcacaaccauccugguuaguaaaagacgcuccgugggacgaaguaccccucgcccacucucuagugggcuucgcaacagcauacgacuuccucuauaacuaccuaucaaagacacaacaagaaaaauuccuagaagucaucgccaacgccagcggcuacauguacgaaacuagcuaucgacgcggauggggauuucaauaccuccacaaccaccaacccaccaacuguauggcccuacucaccgguucccuaguacucaugaaccagggauaccuccaggaagcguaccuuuggacaaagcagguucuuacuaucauggaaaaaucauuaguccuacugagagagguuaccgacggcagucucuacgaaggaguagcuuacggcucauacacgacgcgcucacucuuucaguacauguuccuaguccagcgccacuucaacaucaaccacuuuggccacccauggcuaaaacaacacuucgccuucauguaccguacaauccuccccggcuuccaacgcaccguagccauagccgacuccaauuacaacugguucuacgguccagaaucccaacucguauuccucgacaaauucguuaugcgaaacggaagcggcaacuggcucgcugaccaaauccgccgcaaccgaguuguagaaggccccggaaccccuuccaaaggacaacgcuggugcacucuccacacagaguuccucugguacgacggaucgcucaaauccgugccgccucccgacuucggcacccccacucuacacuacuucgaagacuggggagucguuaccuacggcucagcccuccccgccgaaauuaaccggucauuccucucauucaaauccggcaaacuuggaggacgugccaucuacgacauaguucaccgcaacaaauacaaggacuggaucaaaggcuggcgaaacuucaaugcuggacacgaacaccccgaucaaaacagcuucaccuucgcccccaacggaguucccuucaucaccgaagcacuguacggaccaaaauacacauucuucaacaacguccugauguucucccccgccgugucuaaaucaugcuucagcccauggguaggacaaguaaccgaagacugcuccagcaaaugguccaaauacaaacaugaccuugccgcuuccugucaaggcagaguagucgcggccgaagagaaaaacggcgucgucuucauacgcggagaaggcguuggagccuacaacccucaacuuaaccucaaaaacguccagcgcaaccucauccuacuccacccgcaacuacugcugcuugucgaccaaauucaccuaggcgaagaaucaccccuggaaaccgccgcuuccuucuuucacaacguagacgugccguucgaagaaaccguugucgacgguguucacggggccuuuauucgccaaagagacggacucuacaaaauguacuggauggacgauaccggcuacucagaaaaagccaccuucgccuccgucacuuacccccgaggguacccguacaacggcaccaauuacguaaacguaaccaugcaccuccgcucaccuauaacccgagccgccuacuuguucaucggcccguccaucgacguucaauccuucaccguacauggcgacucucaacaauuagauguauucaucgcuaccucaaaacacgcauacgcaaccuaccucuggacuggcgaagccaccggccaauccgccuucgcacaagucaucgcagaccgccacaagauccucuucgaucgcaacucagcuauaaaaagcucuauaguaccugaaguaaaagacuacgcggcaauagucgaacagaaccuccagcacuucaaaccagucuuccaacuauuagagaaacaaauccugucccgcguacgcaacacggccucuuuccgcaaaaccgcagaaagacuccuucgcuucuccgacaaacgccaaaccgaagaagcuaucgacagaaucuuugccaucucccagcagcaacaacaacaauccaaaucaaagaaaaaccgacgcgcgggaaaacgcuacaaauucguugacgccguccccgacaucuucgcucaaauugaaguaaacgaaaagaaaauccgccaaaaagcacagauauuagcccagaaagagcuccccaucgacgaagaugaagagaugaaagaccuacucgacuucgcagacgucaccuacgaaaaacacaaaaacggcggucuuaucaaaggccgauucggacaagcgcguauggucacaaccacgcacagccgcgcccccucacucuccgccuccuauacccgacuauuucucauccucaacaucgcaaucuucuucguaaugcuggcaaugcagcucacauacuuccaacgcgcccaaucccugcacggccaacgcugccuauaugccguacuacuaaucgacuccuguauacuccuguggcucuacucauccugcucccaaucccaauguuaa

SEQ ID NO: 4470 - RNA, 2892 nt, Artificial Sequence
  AAH93784 variant
auggccacggccgcagaaaccagcgcgagcgaaccggaggcagaaaguaaagccggaccgaaggccgacggagaagaggacgaaguaaaagcagcaagaacccgacgcaaaguacugagcagggcgguagcagcagcaacauacaaaacaaugggaccagccugggaccaacaagaagaaggagugagcgaaucggacggagacgaauacgcaauggcaaguucagcagaaagcagccccggagaauacgaaugggaguacgacgaagaagaggaaaagaaccaacuagaaaucgagcgacuggaagaacaacucagcauaaacgucuacgacuacaacugccacguagaccuaauccgcuuacuacgacuugaaggcgaacucacaaaaguacgaauggcccggcagaaaaugagugaaauauucccgcucacagaggaacucuggcuggagugguuacaugacgaaauaagcauggcacaagacgggcuggacagagaacacguguacgaccuauucgagaaagcgguaaaagacuacauaugcccgaacauauggcuggaguaugggcaauacagugugggagggaucggacaaaaagggggacuagagaaaguccgcagcguauucgaacgcgcccugagcucgguugggcuacauaugacaaagggacuggcacugugggaagccuaccgagaguucgaaagcgcgauagucgaagcugcacgacuagaaaaaguucacagccuguucagacgucaauuagcaauaccccuauacgacauggaagcaacguucgcggaguaugaagaguggucggaggacccaauaccagagucaguaauccagaacuacaacaaagcacuccaacaacuagaaaaauacaaaccguacgaagaggcgcugcugcaagcggaagcaccccggcuagcggaauaccaagcauacaucgacuucgaaaugaaaauaggagacccagccagaauccagcuaaucuucgagagagcacucguagaaaacugccucgucccagaccucuggauaagguacucacaauaccucgacaggcaacucaaagucaaggaccuagugcugagcguccacaacagggcaauacgaaacugcccauggacaguugcacuauggucgcgauaccuccuagcaauggaacgccacggcguagaccaccaagucauaucaguaaccuucgaaaaagcccuaaacgcuggcuucauccaagcaacagacuacguagagaucuggcaggcguaccuggacuaucuccgaaggcgaguagacuucaagcaggacagcucuaaggaauuagaggagcuacgcgccgccuucacgcgagcacuagaguaccucaaacaggagguagaagaacgauucaacgagagcggcgacccuucaugcguaaucaugcaaaacugggcccgaaucgaagccagacugugcaacaacaugcaaaaggcaagagaauuaugggacagcauaaugaccagagggaacgccaaauacgcaaacauguggcuggaauacuacaaccuggagcgggcccauggcgacacacaacacugccggaaagcccuacaccgcgccgugcaaugcacgagcgacuaccccgaacacguaugcgaaguccuacuaaccauggaaagaacagaaggaagccuagaagauugggacauagccguccagaaaacagagaccagauuagccaggguuaacgaacaacgaaugaaagcggccgaaaaagaagcagcgcucguacaacaagaggaggaaaaggcagagcaacgcaaaagggccagggccgaaaagaaagcccugaaaaagaaaaagaaaauccgaggacccgagaagagaggcgcagacgaagaugacgagaaggaauggggagaugacgaagaggaacagccaaguaagagacgcaggguggaaaacagcauacccgccgccggggagacacaaaacguagaggucgcggcggggccagcagggaagugcgccgcaguagacguggaaccgcccagcaaacaaaaagaaaaagcggcaucccuaaagagagacaugccgaaaguccuacaugacucauccaaagacucaauaacgguauucgucagcaaccuaccauacagcaugcaagaaccggacacaaaacugagaccacuguucgaggccuguggagaagugguccaaauacggccgauauuuucgaacagaggcgacuucagaggauacugcuacguggaguucaaagaagagaaaagcgcacuccaagcgcuagagauggacagaaaaucgguagaaggcagaccaauguucguaagcccgugcgucgacaaaagcaaaaaccccgacuuuaaaguguucagauacucaaccagccuagagaaacacaaacuguucaucagcggccugccauucagcugcacgaaagaggaacuggaggaaaucugcaaagcacacgggacagugaaagaccuucgguuagugaccaaccgagccggaaagcccaaaggacuagcauacguagaauacgagaacgagucccaggcaagccaagccgucaugaaaauggacgggaugacaauaaaagaaaacauaauaaaagucgcgaucagcaaucccccacaacgaaagguaccagagaagcccgaaacacgaaaagcccccgguggaccgaugcuccuaccccaaacauauggagccaggggaaaaggaagaacacaacuaagucuacugccacgcgcccuacaaaggccaagcgccgccgcgccccaagcggaaaacgggccagcggccgcacccgcagucgcggcaccggcagcgacggaggcgccaaagaugagcaacgcagacuucgccaaacucuuccugagaaaguag

SEQ ID NO: 4471 - RNA, 2283 nt, Artificial Sequence
  AAC51668 variant
augaaaaccugggucaagaucguauucggcgucgccacauccgccguccuagcccuccuaguaaugugcaucguccuacgccccucuagaguccacaacucagaagaaaacaccaugcgggcacucacccucaaagacauccugaacggcacauucuccuacaagaccuucuuccccaacuggauaucgggccaagaauaccuccaccaauccgccgacaauaauaucguacucuacaacaucgaaaccggccaauccuacacuauacucucaaaccgcacuaugaaaucagucaacgcauccaauuacggccucucccccgaccgacaauucgucuaccuugaaagcgacuacuccaaauuauggagauacuccuacacugccaccuacuauauuuacgaccucucaaacggcgaguucguccgaggcaacgaacuaccccgccccauccaauaccuaugcuggucccccguaggcucaaaauuagccuacgucuaccaaaacaacauauaccuaaaacaaagacccggcgacccacccuuccaaaucaccuucaacggccgagaaaacaaaauauucaacgguauaccagacugggucuacgaagaagagaugcuagccaccaaguacgcgcuauggugguccccaaauggcaaguuccuugccuaugccgaguucaacgacacagacauccccgucauagcauacucauauuauggagacgaacaguacccccgcacaauaaacauucccuaccccaaggcaggcgcaaagaacccggucguccgcauuuucauuauagacaccaccuaccccgcuuacgugggcccccaagaaguaccuguucccgcgaugaucgcauccuccgacuacuacuucuccuggcucacaugggucacagacgaacgaguaugccugcaauggcucaaacgcguccaaaaugucaguguccucuccauaugcgauuuccgagaggacuggcagacaugggacugcccuaaaacccaagaacacauugaagaguccagaaccggaugggcaggaggcuucuucguaucuaccccagucuucaguuacgacgccauauccuacuacaagaucuucagcgacaaggacgguuacaagcacauccacuacauuaaggacacggucgaaaacgccauccagaucaccagcggaaaaugggaggcaaucaacaucuuucgcgucacacaagacucccuauucuacucauccaacgaguucgaagaauaccccggccggcgaaacauauaccgcaucagcaucggcagcuaucccccauccaagaaaugcguaaccugccaccuccgcaaagaacgaugucaauacuacacagccagcuucagcgacuacgcgaaguacuacgcccuugucugcuacggcccaggcauaccuauuuccacccuccacgacggcaggaccgaucaagaaaucaagauccucgaagaaaacaaggaacuagagaacgcccucaaaaacauacaacuucccaaggaagagaucaagaaacuggaaguagacgaaaucacacuaugguacaaaaugauacuucccccacaguucgaccgcucuaagaaauacccguuacucauccaagucuacggcggccccugcagccaauccguccgcucaguauucgccgugaacuggauuuccuaccucgccaguaaagagggcauggucauagcccucgucgauggacgcggaaccgccuuccaaggcgacaaacuccuauacgcugucuaccgcaaacucggcguauacgaagucgaggaccaaauaaccgccguccggaaauucaucgaaaugggcuucauagaugaaaaacgcauagccauauggggcuggucauacgguggcuacguaucaagccuagcccucgcauccgggacuggacucuucaagugcggcauagccguggcccccgucucauccugggaguacuacgcguccguguacacagagagguucaugggccuacccacaaaagacgacaaccuugaacauuacaaaaacuccaccgucauggcuagagcggaauacuuucgcaacgucgacuaccuccucauccacggcaccgccgacgacaauguccauuuccaaaacuccgcacaaauagcaaaagcacuugucaacgcgcagguugauuuccaggccaugugguauucagaccaaaaccacggccuauccggacuauccaccaaccaccuuuacacacacaugacccauuuccuuaaacaaugcuucucccucucagacuaa

SEQ ID NO: 4472 - RNA, 1128 nt, Artificial Sequence
  CCDS32839.1 variant
auggacgcccuacagcucgccaacucagcuuucgccguagaccucuucaaacaacucugugaaaaagagccccuaggcaacguccuauucucccccaucugccucagcacaucccugagccuggcccaagucggagcuaaaggcgacaccgccaacgaaaucggccaagugcuacacuucgaaaacguaaaagacguaccauucggcuuccaaaccgucaccucagacguaaacaaacucucuagcuucuacucccucaaacuaaucaagcgccucuacguagacaaaucccucaaccucuccaccgaguucaucuccuccaccaagcgacccuacgccaaagagcuugaaaccguagacuucaaagacaaacucgaagaaaccaaaggccaaaucaacaacucaauaaaagaccuaaccgacggccacuucgaaaacauccucgccgacaauuccgucaacgaccaaaccaaaauccucguggucaacgccgccuacuucgucggcaaauggaugaagaaauucagcgaguccgaaaccaaagaaugcccauuccgcgucaacaaaacagacaccaaacccguccaaaugaugaauauggaagcaaccuucugcaugggaaacaucgacuccaucaacugcaaaaucaucgaacuacccuuccaaaacaaacaccucuccauguucauccuacuccccaaagacgucgaagacgaaagcacaggccuagaaaagaucgaaaaacaacucaacuccgaaucccuaucacaauggaccaaccccuccaccauggccaacgcaaaaguaaaacucuccauacccaaauucaaggucgagaaaaugaucgaccccaaagccugccucgaaaaccucggccucaagcacaucuucuccgaagacaccuccgacuucucaggcauguccgaaaccaaaggaguagcccucagcaacguaauacacaaggucugucuagaaaucaccgaagacggcggcgacuccaucgaaguccccggcgcccgcauccuccaacacaaagacgaacuuaacgcagaccaccccuucauauacaucauacgccacaacaaaacgcgcaacaucaucuucuucggcaaauucuguagcccguaa

SEQ ID NO: 4473 - RNA, 1002 nt, Artificial Sequence
  AAH06564 variant
auggccugcucccgcccccccagccaaugcgaacccaccucacuaccccccggcccccccgccggccgacgccaccuuccccucucccgacgacgccgcgaaauguccuccaacaaagaacaacgcucagccgucuucgucauccuauucgcccucaucaccauacuaauccucuacucauccaacuccgcaaaugaagucuuccacuacggaucacuccgcggccgcucccgccgccccgucaaccucaaaaaaugguccaucaccgacggcuacguacccauccucggcaacaaaacccugcccucccgaugccaccaaugcguuaucguaagcuccuccucacaccuccuaggaaccaaacucggacccgaaauugaacgcgcagaaugcaccauacgcaugaacgacgcccccaccaccggcuacuccgccgacguaggcaacaaaaccaccuaccgcgucguagcacacuccucugucuuccgcguucuacgccgaccccaagaauucgucaaucgcacccccgaaaccgucuucaucuucuggggcccccccuccaaaaugcaaaaaccacaaggaucacucguucgcgucauccaacgugccggacuagucuuccccaacauggaagccuacgccgucucccccggccgcaugcgacaauucgacgaccucuuccgcggcgaaacgggcaaagaccgcgaaaaaucccacuccuggcucucgaccggcugguucaccauggucaucgccgucgaacucugcgaccacguacacgucuacggcaugguaccacccaacuacugcucccaacgcccccgacuccaacgaaugcccuaucacuacuacgaacccaagggccccgacgaaugcgucaccuacauacaaaacgaacauucccgcaagggaaaccaccaccgcuucaucaccgaaaaacgagucuucucauccugggcccaacucuacggcaucaccuucucccaucccuccuggaccuaa

SEQ ID NO: 4474 - RNA, 1071 nt, Artificial Sequence
  AAC37586 variant
augucacccugcggccgcgcccgccgccaaaccucccgcggcgccauggcaguccucgccuggaaauucccucgcacacgcuuaccaaugggcgccuccgcccucugcgucgucguccucugcuggcuuuacaucuuccccguauaccgccuacccaacgaaaaagaaauaguccaaggcguccuacaacaaggcaccgccuggcgccgcaaccaaaccgccgcccgcgcauuccgcaaacaaauggaagacugcugcgaccccgcccaccucuucgccaugaccaaaaugaacuccccaaugggcaaaucaaugugguacgacggcgaauuccucuacuccuucaccaucgacaacucaacauauucccucuucccccaagccacccccuuccaacucccccucaaaaaaugcgcaguaguuggcaacggcgguauccucaaaaaaucaggcugcggccgccaaaucgacgaagccaacuucgucaugcgcugcaaccuccccccccucuccuccgaauacacaaaagacgucggcuccaaaucacaacucgucaccgcaaaccccuccaucauccgacaaagguuccaaaaccuacuauggucacgaaaaacauucgucgacaacaugaaaaucuacaaccacucauauauuuacaugcccgccuucucaaugaaaaccgguaccgaaccuucccuccgugucuacuauacacucuccgacgucggcgccaaccaaacaguccucuucgccaaccccaacuuccuccgcuccauaggaaaauucuggaagucucgcggcauacacgccaaacgccucucaaccggccuuuuccucgucuccgccgcccucggccucugcgaagaggucgccaucuauggcuucuggccauucucagucaacaugcacgaacaacccaucucgcaccauuacuacgacaauguucuaccauucucuggcuuccacgccaugcccgaagaauuccuacaacuaugguaccuccacaaaaucggcgcccuccgcaugcaacucgaccccugcgaagacaccucacuacaacccaccuccuaa

SEQ ID NO: 4475 - RNA, 1257 nt, Artificial Sequence
  BAG50894 variant
augcgaaccaaagccgccggaugcgccgaacgccgcccccuccaaccccgcaccgaagccgccgccgccccagcaggacgugccaugcccuccgaauacaccuacgucaaacuccgaucagacugcucccgccccucccuucaaugguacacccgcgcccaguccaaaaugcgacgcccaucccuacuccucaaagacauccucaaaugcacccuccucguauucggcguauggauacuauacauacucaaacuaaacuacacaaccgaagaaugcgacaugaagaaaaugcacuacguagaccccgaccacgucaaacgagcccaaaaauacgcccaacaaguccuccaaaaagaaugccgccccaaauucgccaaaaccagcauggcacuccucuucgaacacagauacuccguagaccuccuccccuucguccaaaaagcccccaaagauuccgaagccgaauccaaauacgacccgcccuucggcuuccgaaaauucuccuccaaaguacaaacacuccucgaacuccuccccgaacacgaccuccccgaacaccuaaaagcaaaaaccugccgccgcugcgucgucauaggauccggcggcauccuccauggacucgaacucggacacacccucaaccaauucgacgucgucauccgacuaaacuccgccccaguugaaggcuacucugaacacgucggcaacaaaaccaccauacgcaugaccuacccagaaggagcaccacuauccgaccuggaauauuacucaaacgaucucuuugucgccguccucuucaaaagcguagacuucaacuggcuccaagccauggucaagaaagaaacccuccccuuuuggguccgccucuucuucuggaaacaagucgccgagaaaaucccccuccaacccaaacacuuccgcauccucaaccccgugaucaucaaagaaacagcguucgacauccuccaauacuccgaaccccaaucccgcuucuggggccgcgacaagaacguccccacaauaggagucaucgccguaguccucgccacccaccucugcgacgaagucucccucgcaggcuucggcuacgaccucaaccaaccccgaacaccccuccacuacuucgacucccaaugcauggccgccaugaacuuccaaaccaugcacaacgucaccaccgaaacuaaauuccuacuaaaauuagucaaagaaggcgucguaaaagaccuauccggcggcauagacagagaguucuaa

SEQ ID NO: 4476 - RNA, 1059 nt, Artificial Sequence
  EAW56837 variant
auggacuuccuacgcaaccucuucucacaaacccucucccucggcucccagaaagaacgccuacucgacgaacuaacccucgaaggcguagcacgauacaugcaaucagaacgcugccgccgcgucaucugccucgucggggcgggcauaucuaccuccgcaggcauccccgacuuccgcucucccuccaccggacucuacgacaaccucgaaaaauaccaccuccccuaccccgaagccauauucgaaauauccuacuucaaaaaacacccugaacccuucuucgcccucgccaaagaacuuuacccuggacaauucaaaccaaccaucugccacuacuucaugcgccuccucaaagacaaaggccuccuacuccgaugcuacacccaaaacaucgacacacuagaacgaauagccggccuugaacaagaagaccucgucgaagcacacggaacauucuacacaucccacugcgucuccgccucaugucgccacgaauacccccuauccuggaugaaagaaaagauauucuccgagguaacccccaaaugcgaagacugccaaucccucgucaaaccagacaucgucuucuucggcgaaucacucccagcccgauucuucuccugcaugcaaucagacuuccucaaaguagaccuccuacuagucaugggcacaucccuccaaguccaacccuuugccagccucaucuccaaagcaccccucuccaccccccgacuccucaucaacaaagaaaaagccggccaaucagaucccuuccucggcaugaucaugggccuaggcggcggcauggacuucgacuccaaaaaagcguacagagacgucgccuggcucggcgaaugcgaccaaggcugccucgcccuagcugagcuccucggcuggaaaaaagaacuggaagaccucguccgaagagaacacgccuccaucgacgcacaaucuggcgccggcguccccaaccccucaacauccgccucccccaaaaaaucccccccccccgccaaagacgaggcccguaccaccgaacgcgaaaaaccccaauaa

SEQ ID NO: 4477 - RNA, 1170 nt, Artificial Sequence
  AAD40850 variant
auggccgaaccagaccccucccacccccucgaaacacaagccggcaaaguccaagaagcccaagacagcgacucugacuccgaaggaggcgccgcaggaggagaagccgacauggacuuccuccgaaaccucuucagccaaacccuaucacuaggcagccaaaaagaacgccuccucgaugaacuaacccucgaaggagucgcccguuacaugcaauccgagcgcugccgccgcgucaucugccucgucggcgcaggcauauccaccuccgccggcauuccagacuuccgaucccccucaaccggccuuuacgauaaccucgaaaaauaccaccuaccauaccccgaagccaucuucgaaauaucauacuucaaaaaacaccccgaaccauucuucgcccucgcaaaagaacucuaccccggccaauucaaacccaccaucugccacuacuucaugcgccuccucaaagacaaaggacugcuacucagaugcuacacccaaaacaucgacacacucgaacgcaucgccggccuagaacaagaagaccuagucgaagcacacggcaccuucuacacaucccacugcgucuccgccuccugccgccacgaauacccccucucauggaugaaagaaaaaaucuuuucugaagucacccccaaaugcgaagauugccaaucccucgucaaacccgacaucguauucuucggcgaaagccuccccgcccgcuucuucucuugcaugcaauccgacuuccucaagguugaccuccuccuagucaugggcaccucccuccaaguccaacccuuugccucacucaucucuaaagccccccuaagcaccccccgacuacucauaaacaaagaaaaagccggacagucggacccuuuccucggcaugaucaugggacucggcggcggcauggacuucgacuccaaaaaagccuaccgugacgucgccuggcucggcgaaugcgaccaaggaugccuagcucucgccgaacuccucggauggaaaaaggaacuugaagaccucguccgccgcgaacacgcauccauagacgcccaaucaggagcaggcguccccaaccccuccaccuccgcauccccaaaaaaaagcccccccccagccaaagacgaggcccgcaccaccgaacgagaaaaaccccaauga

SEQ ID NO: 4478 - RNA, 1401 nt, Artificial Sequence
  AAH02824 variant
auggccgaagaacaagaccuauccgaagucgaacugucgccaguaggaagcgaagaaccccgcugccucuccccuggaagcgcacccucccugggacccgacggcggaggcggcgguuccggccuccgagccagccccggcccaggcgaacucgguaagguaaagaaagaacaacaagacggagaagcugacgaugacaaauuucccgucugcauccgcgaagccgucucccaaguccucuccggauacgacuggacccucguaccaaugccugucagaguaaacggcgcauccaaauccaaaccccacguaaaaagaccaaugaacgcauucauggucugggcacaagccgcacgaagaaaacucgcagaccaauacccccaccuacacaacgccgaacuaagcaaaacacucggcaaacuauggcgacuacuaaacgaaucagacaaacgcccauucaucgaagaagcagaaagacuccgaaugcaacacaagaaagaccacccugacuacaaauaccagccccgaagacgcaaaaacggcaaagcagcacaaggagaagcagaaugccccggcggcgaagccgaacaaggaggcaccgccgccauccaagcacacuacaaauccgcccaccuagaccaucgacaccccggagaaggcagcccuaugucagacggcaacccagaacaccccuccggccaaagccacggaccgcccacaccacccaccacccccaaaaccgaacuccagagcggcaaagccgacccaaaacgagauggccgaucaaugggcgaaggcggcaaaccccacaucgacuucggaaacguagacaucggcgaaaucucacacgaaguaaugagcaacauggaaaccuucgacgucgcagagcuagaccaauaccuaccacccaacggccaccccggccacgucuccucauacagcgccgccggauacggccuaggcucagcacuagcagucgccucaggccacagugcauggauaucaaaaccacccggcgucgcacuccccacaguuaguccucccggcgucgacgcuaaagcgcaagucaaaaccgaaaccgccggcccccaaggaccaccccacuacacugaccaacccuccaccucucaaaucgcauacaccucccuaagccuaccccacuacggcuccgccuuccccagcauaucacgaccccaauucgacuacagcgaccaccaacccucaggaccuuacuacggacacagcggccaagccucaggacucuacagcgcauucucauacaugggccccucacaacgcccccucuauaccgccaucuccgacccaagccccuccggaccccaaucccacucacccacccacugggaacaacccguuuacaccaccuuaucccgacccuaa

SEQ ID NO: 4479 - RNA, 456 nt, Artificial Sequence
  AAH32457 variant
auguccauccccuucuccaacacccacuaccgcaucccccaaggcuucggcaaccuccuagaaggccucacccgcgaaauccuccgcgaacaacccgacaacauccccgccuucgccgccgccuacuucgaaucccuacucgaaaaacgcgaaaaaaccaacuucgaccccgccgaauggggcuccaaagucgaagaccgcuucuacaacaaccacgccuucgaagaacaagaaccccccgaaaaaagcgaccccaaacaagaagaaucccaaauaagcggcaaagaagaagaaaccuccgucaccauccucgacuccagcgaagaagacaaagaaaaagaagaagucgccgccgucaaaauacaagccgccuuccgcggccacaucgcccgcgaagaagccaaaaaaaugaaaaccaacagccuccaaaacgaagaaaaagaagaaaacaaauaa

SEQ ID NO: 4480 - RNA, 294 nt, Artificial Sequence
  AAF28420 variant
auggauaaacagagcucggccgggggcgugaaaaggagcgugcccugugacucgaacgaggccaaugaaaugaugccggaaacgcccacgggcgauagcgauccccagcccgcgcccaagaaaaugaaaacgagcgagagcucgaccauacucguggucagguacaggcgcaauuucaagcgcacgagcccggaggaacucuugaacgaucacgcgcgcgagaacaggaucaaucccuugcaaauggaagaggaagaguucauggaaauaaugguggaaauacccgcgaaauag

SEQ ID NO: 4481 - RNA, 426 nt, Artificial Sequence
  AAH62750 variant
auggagcaaccgaccucgagcacgaacggggaaaagaccaagagcccgugcgagagcaauaacaagaaaaaugacgagaugcaggaagugcccaaucgcgugcucgcgcccgagcaaucgcucaagaaaacgaaaacgagcgaguacccgaucauauucguauacuaucucaggaaagggaaaaagaucaauagcaaucaauuggaaaaugaacagagccaggaaaauagcauaaacccgauccagaaagaggaagaugaaggggucgaucucucggaagggagcucgaacgaggacgaggacuugggcccgugcgagggcccgagcaaggaagauaaagaucucgauagcucggaagggagcucgcaagaggacgaggacuugggccugagcgagggcucgagccaggacucgggcgaggacuag

SEQ ID NO: 4482 - RNA, 567 nt, Artificial Sequence
  AAH01003 variant
augaacggcgacgacaccuucgccaaacgcccacgcgacgacgccaaagccagcgaaaaacgcuccaaagccuucgacgacaucgcaaccuacuucuccaaaaaagaauggaaaaaaaugaaauacuccgaaaaaaucuccuacgucuacaugaaacgaaacuacaaagccaugaccaaacucggauucaaagucacccuacccccauucaugugcaacaaacaagcaaccgacuuccaaggcaacgacuucgacaacgaccacaaccgccgcauccaagucgaacacccccaaaugacauucggccgccuccaccgcaucauccccaaaaucaugcccaaaaaacccgccgaagacgaaaacgacuccaaaggcgucuccgaagccagcggcccccaaaacgacggcaaacaacuacacccccccggcaaagccaacaucuccgaaaaaaucaacaaacgcuccggcccaaaacgcggcaaacacgccuggacccaccgccuacgagaacggaaacaacucgucaucuacgaagaaaucuccgaccccgaagaagacgacgaauaa

SEQ ID NO: 4483 - RNA, 567 nt, Artificial Sequence
  AAH16957 variant
augaacggagacgacgccuucgccaggcgcccgaccguaggcgcgcaaauaccagagaaaauacaaaaggccuucgacgacaucgcgaaauacuucucgaaagaggaaugggaaaagaugaaagccucggaaaagaucuucuacguauacaugaaaagaaaauacgaagcaaugacgaaacuaggcuucaaagcgacccuacccccguucaugugcaacaaaagggccgaggacuuccaagggaacgaccucgacaacgaccccaaccgcggaaaccaggucgaacgcccacaaaugaccuucggcaggcuccagggcauaagcccaaaaauaaugccgaagaaacccgcggaagagggcaacgacucggaagaggucccggaagcgagcgggccccagaacgacggcaaagaacugugcccacccgggaaaccgaccacgagcgagaaaauacacgaacgcucgggcccaaaaagaggcgagcacgcguggacgcacagacucagagaaagaaaacagcucgucaucuacgaagagaucucggacccggaagaggacgacgaauag

SEQ ID NO: 4484 - RNA, 567 nt, Artificial Sequence
  AAC05819 variant
augaacggcgacgacaccuucgcccgccgccccaccguaggcgcccaaauccccgaaaaaauccaaaaagccuucgacgacaucgccaaauacuucuccaaagaagaaugggaaaaaaugaaagucuccgaaaaaaucgucuacgucuacaugaaacgaaaauacgaagccaugaccaaacucggcuucaaagccauccuccccuccuucaugcgcaacaaacgcguaaccgacuuccaaggcaacgacuucgacaacgaccccaaccgcggcaaccaaguccaacgaccccaaaugaccuucggcagacuccaaggcaucuuccccaaaaucaugccaaaaaaacccgccgaagaaggcaacgucagcaaagaaguccccgaagccagcggcccccaaaacgacggcaaacaacucugcccccccggcaaacccaccaccuccgaaaaaaucaacaugauaagcggccccaaacgcggcgaacacgccuggacccaccgccuccgcgaacgcaaacaacucgucaucuacgaagaaaucagcgaccccgaagaagacgacgaauaa

SEQ ID NO: 4485 - RNA, 567 nt, Artificial Sequence
  AAC05820 variant
augaacggcgacgacgccuucgcccgacgcccacgcgacgacgcccaaaucagcgaaaaacuccgcaaagccuucgacgacaucgccaaauacuucucaaaaaaagaaugggaaaaaaugaaauccucagaaaaaaucgucuacgucuacaugaaacucaacuacgaagucaugaccaaacucggcuucaaagucacccuacccccauucaugcgcuccaaacgcgcagccgacuuccacggcaacgacuucggcaacgaccgcaaccaccgcaaccaagucgaacgcccccaaaugacauucggcucccuccaacgcaucuuccccaaaaucaugcccaaaaaaccagccgaagaagaaaacggccuaaaagaaguccccgaagcauccggaccccaaaacgacggcaaacaacuaugcccccccggcaaccccagcacacuagaaaaaaucaacaaaaccuccggccccaaacgcggcaaacacgccuggacacaccgccuccgcgaacgcaaacaacuagucguauacgaagaaaucuccgaccccgaagaagacgacgaauaa

SEQ ID NO: 4486 - RNA, 888 nt, Artificial Sequence
  CCDS32420.1 variant
auggaacucauacaagacaccucacgccccccucuagaauacgucaaaggcguccccuuaauaaaauacuucgccgaagcccucggcccccuacaaucauuccaagcccgccccgacgaccuccucaucucaaccuaccccaaauccggaacaacaugggucucccaaauacucgacaugaucuaccaaggaggcgaccuagaaaaaugccaccgagcccccaucuucaugcgcguccccuuccucgaauucaaagcccccggcaucccauccggcauggagacacucaaagacacccccgccccccgacuacuaaaaacccaccucccccuagcccuacucccccagacccuccucgaccaaaaggucaaaguagucuacgucgcccgcaacgcaaaagacgucgcagucucauacuaccacuucuaccacauggcaaaaguacaccccgaacccggcaccugggacagcuuccucgaaaaauucauggucggcgaaguauccuacggcuccugguaccaacacguacaagaauggugggaacuauccagaacccaccccguccuauaccucuucuacgaagacaugaaagaaaaccccaaaagagaaauacaaaagauacucgaauucgucggccgaucucuccccgaagaaaccgucgacuuugucguccaacacaccuccuucaaagaaaugaaaaaaaaccccaugaccaacuacaccaccgucccccaagaauucauggaccacuccaucucccccuucaugcgcaaaggcauggccggcgacuggaaaaccacauucaccgucgcccaaaacgaacgcuucgacgccgacuacgccgaaaaaauggccggcugcagccucuccuuccgcuccgaacucuaa

SEQ ID NO: 4487 - RNA, 3807 nt, Artificial Sequence
  CCDS43990.1 variant
augaucgccgccccagagaucccgaccgacuuuaacuuacuucaggagagcgagacccacuucagcuccgacacggacuucgaggacauagagggcaagaaucagaagcaggggaagggaaagaccugcaagaaagggaagaagggccccgccgaaaaggggaagggcggcaacgguggcgggaaaccgcccagcggccccaaucgcaugaacgggcaucaccagcagaacggcguggagaacaugaugcuguucgaggucgugaagaugggcaagagcgccaugcaguccguagucgacgacuggaucgaguccuacaaacacgacagggacaucgcccuguuggaccugaucaacuucuucauccaaugcuccggaugcaagggcguggugaccgcagagauguuucgccauaugcagaacagcgagaucauccggaagaugaccgaagaguucgacgaggacaguggugacuacccccugacaauggccgggccccaguggaagaaguucaagaguuccuucugcgaguucaucggaguccucguacgccagugccaguacagcaucaucuacgacgaauacaugauggacacagugaucucccugcugacggggcucagcgacucccagguacgggcguuccgccacaccucuacgcuggccgccaugaaacugaugaccgcccucgugaacguugcgcugaaccuguccaucaacauggacaauacccaacggcaguacgaggccgagcgcaacaagaugaucggcaagcgggccaacgagcgccucgaguuacuacuccagaaacggaaggagcugcaggagaaucaggacgaaauagagaauaugaugaacgccaucuucaagggggucuucgugcaccgcuaccgggacgcaaucgcggagauccgcgcuauaugcauugaggagaucgggaucuggaugaagauguacagcgacgcauucuuaaacgacuccuacuugaaguacgugggguggaccaugcacgacaaacagggcgagguccggcuuaagugucugaccgcccuccagggcuuauacuacaacaaggaguuaaacagcaaacucgagcuguucaccagcagguucaaggaccgaauugucucgaugacgcuggacaaggaguacgacguggccguucaggcgaucaagcuccugacucugguguuacaaagcuccgaggaggugcugacggccgaggacugugaaaacgucuaccacuugguguacagcgcgcaccgccccguggccgucgccgcuggggaguuccuuuacaaaaagcucuuuucccggcgcgacccggaggaggacggcaugaugaagcggcgcggacgucagggccccaacgcaaaccuggugaagacucucguauucuucuuccuggagagugagcugcacgagcacgccgccuacuuaguagacuccaugugggacugcgccaccgagcugcugaaggacugggagugcaugaacagccugcuacuggaggagccccuauccggcgaggaggcgcuaacggaccggcaggaaagcgcccucaucgagaucaugcugugcacuauccgacaggccgccgagugucacccgcccgugggucgggguaccggcaagagagucuugaccgccaaggagaagaaaacacagcuagacgaccguacgaagaucaccgaacuguuugccguggcucucccacagcuacuggccaaguacuccguggacgccgagaaggucaccaaccuccuacagcugccccaguacuucgaccucgaaauauacaccaccggccgccucgagaagcaccuggaugcgcuccugcggcagauccgaaacaucguggagaagcacacggacaccgaugugcuugaggccugcuccaagaccuaccacgcccucugcaacgaagaguucacgaucuucaaucgggucgauaucucccgcagccagcuaaucgacgagcuggcugacaaguucaaccggcuccuggaggacuuccugcaagaaggggaagaacccgacgaggacgacgccuaccagguacucuccacccugaagcgcaucacugcuuuccacaacgcacacgaccugagcaagugggaccucuucgccugcaacuacaagcugcugaaaacgggcauugagaacggggacaugcccgagcagaucgugauccacgcccuccagugcacgcacuacgucaucuuauggcagcuggcgaagaucaccgaguccaguaguacaaaggaggaccuucugcggcugaaaaagcagaugcguguguucugccagaucugccagcacuacuuaaccaaugugaacaccacgguaaaggagcaggcuuucaccaucuuaugcgacauccugaugaucuuuagccaccagauuaugagcggcggcagagacaugcuggaaccccuaguguacacccccgacuccagccugcaauccgaacuccugagcuucauccuagaccacguguucaucgagcaggacgacgacaauaauagugcugacgggcagcaggaggacgaggcuucgaagauagaggcccuccauaagcgccggaaccugcuggcggccuucugcaaacucaucgucuacaccgugguggagaugaacaccgcagccgauaucuucaagcaguacaugaaguacuacaacgauuauggcgauaucaucaaagaaaccaugaguaagacccgccagauagacaagauccagugcgccaagacccugauccuaucgcuccaacagcuuuucaacgagaugauccaggagaacggauacaacuucgaccgguccagcuccacguuuucuggaauaaaagaacuggcgaggcgcuucgcccuaaccuucggccuggaccagcugaagacgcgcgaggccauugccaugcuacacaaggacgggauagaguucgccuucaaggaaccuaacccgcagggcgagucccacccuccccugaaccuggcuuuccucgacauucugagcgaguucuccagcaagcuccuucgccaggacaagcggacggucuauguguaccuggagaaguucaugacguuccagaugucccuucgccgggaggacguguggcucccccugaugagcuaccgcaacagccugcucgccgggggcgacgacgacacgauguccgucaucagcgguaucuccagccguggcuccaccgugcgcagcaagaaguccaagcccucaacaggcaagcggaagguggucgaagggaugcagcugucccugacggaggaaagcucaagcuccgacuccauguggcucucccgcgagcagacccugcacacccccgugaugaugcaaacgccucaacugaccagcaccaucaugcgggaaccuaaacgccuccggccggaagacuccuucaugagcgucuaucccaugcagaccgagcaccaccagacaccccuggacuacaacacacaggucacauggaugcuggcccagaggcagcaggaggaggcccggcagcagcaggagagggccgcgaugaguuacgugaaacuucggaccaaccugcagcacgccauccgccggggcacgucucugauggaagaugacgaggaaccuaucguagaggacgucaugaugagcuccgaggggcggaucgaggaccucaaugagggaauggacuuugacaccauggacauugaccuuccgccaucgaagaaccggcgcgagcgcaccgaacugaaacccgauuucuucgaccccgcgagcauuauggacgaaagcgucuuagggguguccauguucuga

SEQ ID NO: 4488 - RNA, 1473 nt, Artificial Sequence
  CCDS5615.1 variant
auggaauccaucucaaugaugggcucucccaaaucccucuccgaaacauuccuccccaacggcaucaacgguauaaaagacgcccgaaaagucaccgucggcgucaucggcuccggcgacuucgccaaaucccuaaccauacgccuaauccggugcggcuaccacgucguaaucggaucccgcaacccaaaauucgccagcgaguucuucccccacgucgucgacgucacucaccacgaagacgcacucacaaaaaccaacaucaucuucguagcaauucaccgcgaacacuacaccucccucugggaccuucgccaucuccucguaggcaaaauucuuaucgacgucuccaacaacaugcgcaucaaccaauaccccgaauccaaugccgaauaccucgccucccuauuccccgacucccuaauagucaaaggauucaacgucgucuccgcuugggcucuccaacucggccccaaggacgccucccgccaagucuacaucugcucaaacaacauccaagcacgccaacaaguaaucgaacuugcccgccaacucaacuuuauuccuaucgaccucggcucccucuccagcgcccgcgaaaucgaaaaccugccccuccgccucuucacccucuggcgcggacccgucguagucgccaucucccucgccacuuucuucuuccucuacucauucguccgcgacgucauccacccauacgcccgcaaccaacaauccgacuucuacaaaaucccuaucgaaaucguaaauaaaaccuuaccaaucgucgcuaucacccuacucucccucgucuaccuugcaggucuccucgccgcugccuaccagcucuacuauggcacuaaauaccgccgcuucccaccuuggcucgaaaccuggcuccaaugucgcaaacaacuaggccuacucuccuucuucuucgccaugguccacgucgcauacucccucugucuaccuaugcgccgauccgaacgcuaccuauuccucaacauggcauaccaacaaguccaugcuaacaucgaaaacuccuggaacgaagaagaagucuggcguauagagauguacauauccuucggcauaaugucuuuaggccuucucucacuccucgccgucaccucuauacccucagucucuaacgcccuuaauuggcgcgaguucucauucauacaguccacccuaggcuacgucgcgcuccucaucagcacauuccacguucuaauauacggcuggaagcgcgccuucgaagaagaauacuaccgcuucuacaccccacccaacuucguacucgcacucguccuccccucgaucgucauccucggcaagauuauccuauuccuacccugcaucagccgcaaacucaaacgaauaaagaaagguugggaaaagagccaauuccucgaagaaggcaugggaggcaccaucccccacguuucccccgaacguguaaccgucauguaa

SEQ ID NO: 4489 - RNA, 777 nt, Artificial Sequence
  EAW93749 variant
auggaaucccgcaaagacaucaccaaccaagaagaaaucuggaaaaugaaaccccgccgcaaccucgaagacaacgacuaccuacacaaagacaccggcgaaaccucaaugcuaaaacgacccguccuccuccaccuccaacaaaccgcccacgccgacgaguucgacugccccagcgaacuccaacacgcccaagaacucuucccccaauggcaccuccccaucaaaaucgccgccguaauggcaucccucaccuuccucuacacccuucuccgagaagucauucacccccucgccaccucacaccaacaauacuucuacaaaauccccauccucgucauaaacaaaguccuccccauggucuccaucacccuccuagcccucgucuaccuccccggcgucaucgccgccaucguccaaguccacaacggcaccaaauacaaaaaauucccccacuggcucgacaaauggaugcuaacccgcaaacaauucggccuacucucccuuuucuucgccguccuccacgccaucuacacccucucauacgccaugcgccgcuccuaccgcuacaaacuccucaacugggccuaccaacaaguccaacaaaacaaagaagacgccuggauagaacacgacgucuggcgcauggaaaucuacgucucccucggcaucguaggccucgcaauccucgcccuccucgcaguuaccuccauacccuccguauccgacucccucacauggcgcgaauuucacuacauccaagucaacaacaucuaa

SEQ ID NO: 4490 - RNA, 1020 nt, Artificial Sequence
  AAD15620 variant
auggagagccggaaagacaucacaaaccaagaagaacucuggaaaaugaaaccgcgccgcaaccucgaagaagacgacuaccuacacaaagacaccggagaaaccuccaugcucaaacgacccguccuacuucaccuccaccaaaccgcccacgccgacgaauucgacugccccuccgaacuucaacacacccaagaacucuucccacaauggcaccuacccaucaaaaucgccgcuaucaucgccucccucaccuuccucuacacucuccuaagagaagucauccacccccucgccaccucucaccaacaauacuucuacaaaauccccauccucgucauuaacaaaguccuccccauggucucuaucacccuccucgcccucgucuaccuccccggcgucaucgccgccaucguccaacugcacaacggcacaaaauacaaaaaauucccccacuggcuagacaaauggaugcucacccgaaaacaauucggccuccucuccuucuucuucgccguccuccacgccaucuacucucuauccuaccccaugcgccgauccuaccgcuacaaacuacucaacugggccuaccaacaaguacaacaaaacaaagaagacgccuggaucgagcacgacgucuggcgcauggaaaucuacguaucccucggcauagucggccuagccauccucgcccuccucgcuguaacauccauccccuccguauccgacucccucaccuggcgggaauuccacuacauccaauccaaacucggcaucgucucucuccuccucggcacuauccacgcccucaucuucgccuggaacaaauggaucgauaucaaacaauucgucugguacaccccaccuaccuucaugauagccgucuuccuccccaucgucguacucauauucaaaucuauacuauuccuacccugccuacgcaaaaaaauccucaaaauccgccacggcugggaagacgucaccaaaaucaacaaaacagaaaucugcucccaacucuaa

SEQ ID NO: 4491 - RNA, 498 nt, Artificial Sequence
  CCDS32752.1 variant
augggagccccgacccugcccccggccuggcaaccauuccugaaagaccacagaaucucaaccuucaaaaacuggccguuccuagaaggaugcgcaugcacacccgagcgcauggccgaagccggauucauacacugcccaacagaaaacgaaccagaccuagcccagugcuucuucugcuucaaagaacuagaaggaugggagccagacgacgaccccauaggcccaggcacagucgcauacgcaugcaacaccucaacccuaggcggacgcggaggcaggaucacacgcgaagaacacaaaaaacacucaagcggaugcgcauuccuaagcguaaaaaaacaauucgaagaacucacgcucggagaauuccucaaacucgaccgcgaacgcgcaaaaaacaaaauagccaaagaaacgaacaacaaaaaaaaagaauucgaagaaacagccgaaaaaguacgcagagccauagaacaacucgcggccauggacuaa

SEQ ID NO: 4492 - RNA, 429 nt, Artificial Sequence
  AAC51660 variant
augggcgcccccacccuccccccagccuggcaacccuuccucaaagaccaccgcaucuccaccuucaaaaacuggcccuuccucgaaggcugcgccugcacccccgaacgcauggccgaagccggcuucauccacugcccaaccgaaaacgaacccgaccucgcccaaugcuucuucugcuucaaagaacucgaaggcugggaacccgacgacgaccccaucgaagaacacaaaaaacacuccucaggcugcgccuuccucagcgucaaaaaacaauucgaagaacucacccucggcgaauuccucaaacucgaccgcgaacgcgccaaaaacaaaaucgccaaagaaaccaacaacaaaaaaaaagaauucgaagaaaccgccaaaaaaguccgacgcgccaucgaacaacucgccgccauggacuaa

SEQ ID NO: 4493 - RNA, 2931 nt, Artificial Sequence
  EAW56623 variant
auggaaaaacaaaaaccauucgcccucuucguaccaccccgcucaagcagcucacaaguaagcgccgugaaaccccaaacacugggaggcgacuccaccuucuucaaaucauucaacaaaugcaccgaagacgacuucgaguucccauucgcaaaaacgaaccuuucgaaaaacggggaaaacaucgacuccgacccggcacuccaaaaagucaacuuccugcccguacucgaacaagucggaaacagcgacugccacuaccaggagggccugaaagacucagaccucgagaacagcgagggacuaagccgcguguacagcaaacuguacaaagaagccgagaaaauuaagaaauggaaaguaagcacggaagcagagcuacggcaaaaagaaagcaaacuacaggaaaaccggaaaaucaucgaagcccagcgcaaggccauccaggaacuacaauucggaaacgaaaagguuucgcugaaacuagaagagggaauacaagaaaacaaggaccuaaucaaggaaaacaacgcaacucgccaccugugcaaccuccucaaggaaaccugcgcccggagugcugagaaaaccaagaaauacgaauacgaacgcgaggagacgcggcaggucuacauggaccucaacaauaacaucgagaaaaugaucaccgcauucgaagaauuacgcguccaagcagaaaacucacgacuagaaaugcacuucaaacuaaaagaagacuacgagaaaauccagcaccucgaacaggaauacaaaaaggaaaucaacgacaaagaaaaacaggucagccuccuguuaauacaaauuacagaaaaagaaaacaaaaugaaagaucuaacuuuccuccucgaagagagcagagacaaaguaaaucaauuagaggagaaaacaaaacugcaauccgaaaacuuaaaacaaucaaucgaaaaacagcaccaccuuacaaaagaacucgaagacauaaaaguaagccuccagagauccguauccacccagaaggcccuagaagaagaccuucagauagccaccaagacaaucugccaacucacagaagaaaaagaaacccagauggaagaaucgaacaaagcccgcgccgcacacagcuuuguagucaccgaguucgaaacgacggugugcagccucgaagaacuccuacgcaccgaacaacaaagacuagaaaagaacgaggaucaacuaaaaauacugaccauggaacuacagaaaaagucgagcgaacucgaagaaaugaccaagcuaacaaacaacaaggaaguagaauuggaggaacucaaaaagguccuaggcgaaaaagaaacccuacuauacgaaaacaagcaauucgagaaaaucgccgaagaacuaaaaggaaccgaacaagaacuuauaggccuccuucaagcacgagaaaaagaagugcacgaccucgaaauccaacuaacagcaaucacaaccagcgagcaauacuacagcaaggaagugaaggacuuaaaaaccgaacuugaaaacgaaaaacucaaaaacaccgaacucacaucccauugcaacaaacucagccuggagaacaaggagcuaacacaagagacgagcgacaugacccucgaacucaagaaccaacaggaagacauuaacaacaacaagaagcaagaggagcgcaugcucaagcaaaucgagaaccuccaagaaacagaaacccagcuuagaaacgagcucgaauacguacgcgaagaacuaaaacaaaaacgcgacgaagucaaaugcaaacuagacaaauccgaagaaaacugcaacaaccucagaaaacaagucgaaaauaaaaacaaauacaucgaggagcuccaacaagaaaacaaggcguuaaagaagaaagggaccgcggaaagcaaacaacucaacguguacgagauaaaagucaacaaacuggaacuggaacuggaguccgcaaaacagaaauucggagagaucaccgacaccuaccagaaagagauagaagacaaaaagauauccgaagagaaccuccucgaagaaguugagaaagccaaggucaucgcugacgaggccgucaaacuacaaaaagagaucgacaaacgaugccaacauaaaauagccgaaauggucgcacucauggagaagcacaaacaccaauacgacaagaucauagaagaacgcgacagcgaacucggccuguacaaauccaaagaacaagaacaauccagccugcgcgccagccuggaaaucgaacuauccaaccucaaggccgaacuccucagcgucaaaaagcaacucgaaauagaacgagaggaaaaggaaaaacucaagagggaagccaaagaaaacacggccacccuaaaagagaagaaggacaaaaagacacagaccuuccugcuagagacacccgaaauauacuggaaacucgauucaaaggccguacccucccaaacagucucaagaaacuucacaucagucgaccacggcaucagcaaagacaaacgcgacuaccucuggacaagcgccaaaaacacgcuuagcacaccccucccaaaagccuacaccgucaaaaccccaaccaaacccaaacuccaacaaagagaaaaccuaaacauaccaauagaggaauccaaaaagaaacgaaaaauggcauucgaguucgacaucaacagcgacagcucagaaacaaccgaccuccuaagcauggucuccgaagaagaaacgcugaaaacacuauaccgcaacaacaacccacccgcaagccacuuaugcguaaaaacacccaagaaagcacccagcagccuaacgacccccggcagcacacuuaaauucggcgccauccgcaaaaugcgcgaggacagaugggccgucaucgcaaagauggaucgcaagaagaaacucaaagaagcggagaaacucuucgucuag

SEQ ID NO: 4494 - RNA, 2931 nt, Artificial Sequence
  AAI44020 variant
auggagaaacagaaacccuuugcccuguucgucccgccacgaagcagcuccagccagguaucagccgugaaaccgcaaacacuaggaggggacagcacguucuucaagagcuucaacaaaugcacagaagacgacuucgaguucccguucgccaaaacaaaccucagcaaaaacggggaaaauaucgacagcgacccagcacugcagaaggugaacuucuuaccagucuucgaacaggucgggaacagcgacugucauuaccaagaggggcucaaagacagugaccuagagaacagcgaaggccuuucgcgcguguauaguaagcuguacaaagaagcggaaaagauaaagaaguggaaggucagcaccgaagcagaacuacgccagaaggagagcaagcugcaagaaaaccgcaagaucaucgaagcccagcgcaaagccauacaagaacuacaauucggcaacgagaaagucucucucaaacucgaagagggaauacaagaaaacaaagaccucauaaaggagaacaacgccacgcgccaccucugcaaccugcucaaagaaacaugcgcgaggagcgccgagaagaccaagaaauacgaauacgagagagaagagaccagacaaguuuacauggaccucaacagcaacauagagaaaaugaucacagccuucgaagaacucagaguacaggcagagaacucgcgccuagaaaugcacuuuaaacugaaagaggacuacgaaaagauacaacaccucgaacaggaauacaagaaggagauaaacgacaaagagaagcaaguaucacuccuccugauacaaaucacagaaaaagagaacaaaaugaaggacuuaacguuccuacuugaagaaagcagagacaaggucaaccaacuagaggagaaaacaaaacuucaaucagaaaaccuuaaacaaucaaucgagaaacaacaccaccucaccaaggagcucgaagacauaaaaguaagccuccaaagaagcguaagcacgcaaaaagcauuagaggaagaccuccaaauagccacaaagacgauaugccaacucaccgaagaaaaagaaacgcaaauggaggaaagcaacaaagcaagagccgcccacagcuucgucguaacggaguucgagacuacagucugcagccuagaggagcugcuaaggaccgaacaacaacgacucgagaagaacgaagaucaacuaaaaauacugacaauggaacuccaaaagaaaagcucggagcucgaagaaaugaccaaacugacaaauaacaaagagguagaauuagaggaacuaaagaagguacuaggcgaaaaagagacccuccuguacgaaaacaagcaauucgagaaaauagcggaagaacugaaaggaacagaacaggaacucaucggacugcuacaagcgcgcgaaaaggaaguacacgaccuagaaauccagcugaccgccaucacaacaucggaacaguacuauagcaaagaagugaaagaccuaaaaacagagcucgaaaacgagaaacucaaaaacaccgaacuaaccucccacugcaacaagcuaucacuagagaauaaggagcucacucaagagaccagugauaugacccuggaacucaaaaaccaacaagaagauauaaacaauaacaaaaagcaagaggaacgcaugcucaaacagauagagaaccugcaagagacggaaacccaacuccgaaacgaauuagaauacguccgggaggagcugaaacaaaaacgagacgaagugaaguguaaacuggacaagagcgaggaaaacugcaacaaccuacgcaaacagguggagaacaagaacaaguacaucgaagaacuccaacaagagaacaaagcacuaaagaagaaagggacagcggaaucaaaacaacuaaacgucuacgaaauaaaagugaacaaacuggaacuagaacuggagagcgcaaaacaaaaauucggcgaaauaacagacacauaccaaaaagaaauagaggacaagaaaauaagcgaggaaaaccuccuagaggaagucgagaaagcaaaaguaaucgcggaugaagcggucaaacugcaaaaagaaaucgacaaacgcugccaacacaaaauagccgaaaugguagcgcucauggaaaaacacaaacaccaauacgacaaaaucauagaagaacgcgacagcgaacuagggcuauacaaauccaaagagcaagaacagagcagccuacgcgcaucacucgaaauagaacuaucaaaccucaaagcagaauugcucagugugaagaaacagcucgaaauagagcgagaggaaaaagaaaaacucaaacgcgaagcaaaggaaaacacagcaacacucaaggaaaagaaagacaagaaaacccaaaccuuccuccuagaaacgccagagauuuacuggaaacucgacuccaaagcagucccaucgcaaaccgucagccgaaacuucacaagcguagaccacgggauaagcaaagacaaacgcgacuaccuguggacgucagccaaaaacacacucagcaccccacucccaaaagcauacaccguaaaaacacccacgaaaccaaaacuccaacagcgugaaaaccugaacauacccauagaggagagcaagaagaaaagaaaaauggcguuugaguucgacauaaacagcgacagcucggaaacgaccgaccuccuaagcaugguuucagaggaagaaacccucaaaacucuguaccgcaacaacaacccaccagcuucccaucugugcguaaaaaccccgaaaaaggcaccgagcucacugacaaccccaggcucaacccucaaauuuggagccaucagaaagaugcgagaggaccgaugggcagugauagccaagauggaccgcaaaaagaaacugaaagaggcagagaaacuauucguauaa

SEQ ID NO: 4495 - RNA, 2931 nt, Artificial Sequence
  AAI26267 variant
auggaaaagcaaaaaccauucgccuuauucguaccaccccgcucgagcucaagccaaguauccgccguaaaaccccaaacacuagggggcgacucaaccuucuucaaaucguucaacaaaugcaccgaagacgacuucgaguuccccuucgccaaaacgaaucucuccaagaacggagaaaacaucgacucggaccccgcacuacagaaagucaacuuccuaccaguacuugagcaggucgggaacagcgacugccacuaccaagaaggacuuaaagacagcgaccuagaaaacucggaaggacucagccgcguauacagcaagcuauacaaggaagcagagaaaaucaaaaaguggaaaguaagcacggaagcagaacugcgccaaaaagaaagcaagcuacaggaaaacagaaaaauaauagaagcgcagaggaaagcgauccaagagcuacaauucggcaacgagaaaguaucccucaaacucgaagaagggauccaagaaaacaaagacuuaauaaaagaaaacaaugcgacgcggcaccuaugcaaccuccuaaaagaaacaugcgcccgcagcgcagagaaaaccaagaaauacgaauacgaacgcgaggagacgcgacaaguauauauggaccugaacaacaauaucgagaaaaugauaacagccuucgaggaacucaggguccaggccgaaaacagccgccucgaaaugcacuucaaacuaaaggaagacuacgagaaaauccagcacuuggaacaagaauacaagaaagaaaucaacgacaaagaaaaacaagugagccuccuacugauacagaucaccgaaaaagaaaacaagaugaaggaccucacguuccuccuagaagaaagcagggacaaagucaaccaacuugaagagaaaaccaagcuacaaucagaaaaccucaagcagaguauagaaaagcagcaccaucugacgaaagaacucgaagacaucaagguaagccugcagaggucgguaaguacacaaaaagcauuggaagaagaccuccaaaucgcaaccaaaacgaucugccaacucacagaggaaaaagaaacacaaauggaagaaagcaacaaggcacgagccgcccauaguuucguggucaccgaguucgaaacuacagucugcagccucgaagaacugcuaaggacagaacagcagagacuagaaaagaacgaagaccaacucaagauccuuacaauggagcuacagaagaaaagcagcgagcuagaagaaaugaccaaacucacaaauaacaaagagguggaacucgaagaacuaaagaaaguacuaggugaaaaagagacccuccuauacgaaaacaaacaguucgagaaaaucgccgaagaacucaaaggaaccgagcaagaacuaaucggcuuacuacaggcaagagagaaggaaguacacgaucuggaaauccagcugacagccaucaccaccucagagcaauacuacagcaaagaagucaaagaccuaaaaaccgagcuggagaacgaaaagcucaagaacacagaacucacgucacacugcaacaaacugagccuggaaaacaaagagcugacacaggaaacgucagacaugacacuagaacucaaaaaucaacaagaggacauaaacaacaacaagaaacaagaggagagaaugcugaaacagaucgaaaaccuccaagagaccgagacacaguugcgaaacgaacuagaauacgugcgagaagaacugaaacagaaaagagacgaagucaaaugcaaacuggacaaaucagaggaaaauugcaacaaccuacgcaaacaaguagagaauaaaaacaaguacauagaagaacuacaacaagagaacaaggcacugaaaaagaaagggaccgcggaaucaaaacaauuaaacguauacgaaauaaagguaaauaaacucgagcuggaacuagaauccgccaaacagaaguucggagaaauaacagacacguaccagaaagagaucgaagacaagaaaauaagcgaagaaaaucuccuggaagagguagagaaggccaaagucauagcggaugaagccguaaaauuacaaaaagaaauagacaaacgaugccaacacaaaaucgcugaaaugguagcccuaauggagaagcacaaacaccaauacgacaaaaucaucgaggaacgagacagcgagcugggccuauacaaauccaaagaacaagaacaaucgucgcugcgcgccagcuuagaaauagaacugagcaaccucaaggccgaacugcuaagcgugaaaaagcagcuagaaauagaaagagaggaaaaagaaaaacucaagagggaagccaaggagaacaccgcaacacugaaagaaaagaaagacaagaaaacgcaaacauuccuccuagaaacaccagagaucuacuggaaacucgacagcaaagcgguaccaagucaaaccguaucacgaaacuucacgagcguagaccacggcauaagcaaagacaaacgcgacuaccucuggacgagcgccaaaaauacacucaguacgccccugccaaaagcauacacggucaaaacgcccacgaaaccgaaacuacaacagcgagaaaaccugaacauaccaauugaagagagcaagaagaaaagaaagauggcguucgaguucgauauaaacucggacagcagugaaaccacggaucuccucagcauggucagcgaggaggaaacccucaaaacccucuacaggaacaacaauccacccgccucgcaccugugcgucaaaacccccaaaaaggcacccucaucccucaccacccccggcagcacccugaaguucggcgcgauacggaaaaugcgagaagaccgaugggcagucauagccaaaauggaccggaaaaagaaacucaaagaggcugaaaaacuauucgucuaa

SEQ ID NO: 4496 - RNA, 330 nt, Artificial Sequence
  AAI05300 variant
auggaaaaacaaaaacccuucgcccucuucguccccccccgcuccuccuccucccaagucuccgccgucaaaccccaaacccucggcggcgacuccaccuucuucaaauccuucaacaaaugcaccgaagacgacuucgaauuccccuucgccaaaaccaaccucuccaaaaacggcgaaaacaucgacuccgaccccgcccuccaaaacgucaacuuccuccccguccucgaacaagucggcaacuccgacugccacuaccaagaaggccucaaagacuccgaccucgaaaacuccgaaggccucucccgcgucuacuccaaacucuaa

SEQ ID NO: 4497 - RNA, 1467 nt, Artificial Sequence
  BAF56181 variant
auguccgucgccuucgccgccccucgacaacgcggaaaaggagaaauaacccccgccgccauccagaaaaugcuagacgacaacaaccaccuaauucaaugcaucauggacucccaaaacaaaggcaaaacaucugaaugcucccaauaccaacaaaugcuccacaccaaccucguauaccucgccaccauagcugauucaaaccaaaauaugcaaagccuccuaccagcacccccaacacaaaacaugccaaugggcccaggcggcaugaaccaaagcggacccccaccacccccaagaucccacaacaugccaucagacggcauggucggugguggacccccagcuccccacaugcaaaaccaaaugaacggccaaaugcccgguccaaaccacaugcccaugcaaggccccgggcccaaucaacucaacaugacaaacucaucaaugaacaugcccucauccucccacggcagcaugggcggcuacaaccacucagucccaucaucccaaucaaugcccguucaaaaccaaaugaccaugucccaaggccaacccaugggaaacuacggcccccgacccaacaugagcaugcaacccaaccaagguccaaugaugcaccagcaaccacccucgcaacaauacaacaugccccaaggaggaggccaacacuaccaaggccaacaacccccaaugggaaugaugggccagguaaaccaaggcaaccacaugaugggacagcgucaaaucccacccuacagacccccacaacaaggcccuccccaacaauacucaggccaagaagacuacuacggcgaccaauauucacacggaggccaaggcccacccgaaggcaugaaccaacaauacuaccccgacggacacaacgacuacggcuaccaacaaccaagcuaccccgagcaagguuacgaccgcccguacgaagacucgucccaacacuacuacgaaggcggcaacucccaauacggccaacaacaagacgccuaccaaggacccccaccacaacaaggcuacccgccccaacaacaacaauaucccggccaacaaggcuacccuggccaacaacaaggcuacggcccuucacaaggcggccccggcccccaauacccaaacuauccccaaggccaaggacagcaauacggcgguuaccgcccaacccaaccaggaccaccccaaccgccccaacaacgccccuacggauacgaccagaucaugcccaagaaacccgcagaagacgaaaacgacagcaaaggcgucuccgaagcaucaggaccccaaaacgacggaaaacaacuccacccucccggcaaagccaacaucucagagaaaaucaacaaacgcucuggccccaagcgcggcaaacacgccuggacccacagacucagggaacgaaaacaacucgucaucuacgaagaaaucuccgaccccgaagaagacgacgaauaa

SEQ ID NO: 4498 - RNA, 1374 nt, Artificial Sequence
  BAF56182 variant
augucaguagccuucgccgcccccagacaacgaggaaaaggcgaaauaaccccagcagccauccaaaaaaugcuagacgacaauaaccaccucauccaaugcauaauggacagccaaaacaaaggaaaaaccuccgaaugcucccaguaccaacaaaugcuccauacaaaccucgucuaccuggccacuaucgcagacucaaaccaaaacaugcaaagccuccuucccgcccccccaacucaaaacaugccaaugggcccaggcggcaugaaccaaucaggccccccuccacccccccgcucccauaacaugccaagcgacggcauggucggaggcggcccacccgcaccccacaugcaaaaucaaaugaacggccaaaugcccggccccaaccacaugccaaugcaaggccccggucccaaccaacucaacaugaccaacuccuccaugaacaugcccagcuccucccacggaucaaugggcggcuacaaccacucaguccccucaucccaauccaugccaguccaaaaccaaaugaccaugagccagggccaacccaugggcaacuacggcccccgaccaaacaugucaaugcaacccaaccaaggccccaugaugcaccaacaacccccaagccaacaauacaacaugccucaaggaggcggacaacacuaccaaggccaacaaccccccaugggcaugaugggacaagucaaccaaggcaaccacaugaugggacaacgccaaauaccccccuacaggcccccccaacaaggccccccacaacaauacucaggccaagaagacuacuacggagaccaauauucacacggcggccaaggcccccccgaaggaaugaaccagcaauacuaccccgacggcaacucacaauacggacaacaacaggacgccuaccaaggucccccaccccaacaaggauaccccccacaacaacagcaauaccccggccaacaaggauacccaggacaacaacaaggcuacggccccucccaaggaggacccggcccccaauaccccaacuacccccaaggccaaggacaacaguacgguggauaccgccccacacaacccggccccccccaacccccccaacagcgacccuacggcuacgaccaaaucaugcccaaaaaacccgcagaagacgaaaacgacuccaaaggagucucagaagccucaggcccccaaaacgacggaaagcaacuccacccccccggcaaagcaaacaucuccgaaaaaaucaacaaacguuccggacccaaacgaggaaaacacgccuggacccaccgacuccgcgaacgcaaacagcucguaauauacgaagaaauauccgaccccgaagaagacgacgaauaa

SEQ ID NO: 4499 - RNA, 1467 nt, Artificial Sequence
  BAF56183 variant
augagcgucgccuucgccgccccucgacaacgcggcaaaggcgaaauaacccccgcagccauccaaaaaaugcuggacgacaacaaccaccuaauacaaugcaucauggauucacaaaacaaaggcaaaaccucagaaugcucccaauaccaacaaaugcuacacacuaaucuugucuaccucgcaaccaucgccgacucaaaccaaaacaugcagucccuacuacccgccccccccacucaaaacaugccaaugggacccggcggaaugaaccaaucaggaccacccccacccccucgcucccacaauaugccauccgacggaauggucggcggcggccccccugcaccccacaugcaaaaccaaaugaacggccaaaugccaggacccaaccacaugccuaugcaaggacccggccccaaccaacuaaacaugacgaacucauccaugaacaugcccuccuccucccacggcuccaugggcggcuacaaccacuccguccccuccucccaaucaaugcccguacaaaaccaaaugacaaugagccaaggccagccaaugggcaauuacggaccccgccccaacaugucaaugcaacccaaccaaggccccaugaugcaccaacaaccccccagucaacaauacaacaugccucaaggcggaggccagcacuaccaaggccaacaaccccccaugggaaugaugggccaagucaaccaaggaaaccacaugaugggucaacgacaaaucccccccuaccgcccaccccaacaaggcccaccccaacaauacuccggccaagaagacuacuacggcgaccaauacagccauggcggccaaggaccacccgaaggcaugaaccagcaguacuacccagacggccacaacgacuauggguaccagcaacccuccuaccccgaacaaggcuacgaccgcccauacgaagacuccucccaacacuacuacgaaggcgguaauucccaauacggacaacaacaagacgcauaccaggguccccccccacaacagggauacccaccccaacaacaacaauaccccggccaacaaggcuacccaggccaacaacaagguuacggccccucccaaggcggccccggaccccaauaccccaacuacccccaaggacaaggacaacaauacggcggauaucgccccacccaaccaggacccccacaacccccccaacaacgccccuacgguuacgaccaaaucaugccuaaaaaaccagccgaagaaggcaacgacucggaagaaguacccgaagcuuccggaccccaaaacgacggcaaagaacugugucccccaggcaaacccaccaccucagaaaaaauucacgagcgcucaggccccaaacgaggcgaacacgcauggacccaccgccuccgcgaaagaaaacaacucgucaucuacgaagaaauaucagaccccgaagaagacgacgaguaa

SEQ ID NO: 4500 - RNA, 1374 nt, Artificial Sequence
  BAF56184 variant
augucagucgccuuugccgccccccgccagagaggaaaaggggaaaucacaccugcagccauacaaaaaaugcucgacgacaauaaccaccucauccaaugcaucauggacucccaaaacaaaggcaagaccuccgaaugcucacaauaccaacaaaugcuccacaccaaccucgucuaccucgccacaauagccgacagcaaucaaaacaugcaaucccuccuccccgcuccccccacgcaaaacaugccaaugggcccaggagguaugaaccaauccggacccccaccccccccacgaucccacaacaugcccucagauggcauggucggcggcggcccacccgcaccccauaugcaaaaccaaaugaacggccaaaugccaggccccaaccacaugcccaugcaaggccccggaccaaaccaacuaaacaugaccaacuccuccaugaacaugcccucauccucccacggaagcaugggaggcuacaaccacagcguccccagcagccaauccaugccuguacaaaaccaaaugaccaugucccaaggccaaccaaugggaaacuacggcccccgacccaacauguccaugcaacccaaccaaggcccaaugaugcaccaacaaccaccaagccaacaauacaacaugccacaaggcggaggacaacauuaccaaggccaacaaccacccaugggaaugaugggccaagucaaccaaggcaaccacaugaugggccaacgccaaauucccccauaucgcccaccccaacaaggccccccccagcaguacagcggacaagaagacuacuacggcgaccaauacucacacggcggucaaggcccccccgaagguaugaaccaacaauacuaccccgacggaaacucccaauacggccaacaacaagacgcguaccagggcccaccaccccaacaaggcuaccccccccaacaacaacaauaccccggacaacaaggcuaccccggacaacaacaaggcuacggccccucccaaggcggccccggcccccaguaccccaauuacccccaaggucaaggucaacaauacggaggcuaccgccccacccaacccggccccccccaacccccccaacaacgccccuacggcuacgaccaaauaaugccuaaaaaacccgcagaagaaggcaacgacucagaagaagucccagaagcaagcgguccccaaaacgacggcaaagaacucugcccccccggcaaacccaccacauccgaaaaaauccacgaacgcagcggacccaaacgcggcgaacacgccuggacccaccgacuuagagaaagaaaacaacuugucaucuacgaagaaauaucagacccagaagaagacgaugaauaa

SEQ ID NO: 4501 - RNA, 336 nt, Artificial Sequence
  AAI05590 variant
augaaaaccaacgacaccuacaugaaauucuccuggcucaccguccccgaaaaaucccucgacaaagaacaccgcugcaucguccgccacgaaaacaacaaaaacggcgucgaccaagaaaucaucuucccccccaucaaaaccgacgucaucaccauggaccccaaagacaacugcuccaaagacgccaacgacacccuccuccuccaacucaccaacaccuccgccuacuacauguaccuccuccuccuccucaaauccgucgucuacuucgccaucaucaccugcugccuccuccgccgcaccgccuucugcugcaacggcgaaaaauccuaa

SEQ ID NO: 4502 - RNA, 177 nt, Artificial Sequence
  AAG29337 variant
augcaaauguucccccccuccccccucuucuucuuccuccaacuccucaaacaauccucccgccgccucgaacacaccuucgucuuccuccgcaacuucucccucaugcuccuccgcuacaucggcaaaaaacgccgcgccacccgcuucugggacccccgccgcggcacccccuaa

SEQ ID NO: 4503 - RNA, 1131 nt, Artificial Sequence
  AAF26776 variant
auggccaauuccgcaaacaccaacaccguacccaaacucuaucgcucagucauagaagacguaaucaacgacguccgagacaucuuccuagacgacggcgucgacgaacaaguccuaauggaacucaaaacacucugggaaaacaaacuaaugcaaucacgagcagucgacggauuccacuccgaagaacaacaacuacuccuucaaguccaacaacaacaccaaccccaacaacaacaacaccaccaccaccaccaccaccaacaagcccaaccccaacaaaccgucccccaacaagcccaaacacaacaaguccucaucccagccucacaacaagccaccgcaccccaagucauaguccccgacuccaaacuaauacaacacaugaacgccucaaacaugucagccgcagccaccgccgcaacccucgcccucccagccggcguaacccccguacaacaaauccucaccaacuccggccaacuccuacaaguuguccgcgccgccaacggcgcacaauacaucuuccaaccccaacaauccgucguccuccaacaacaaguaaucccccaaaugcaacccggcggcguacaagccccagucauacaacaaguacuagccccacucccaggcggaauaucaccacaaaccggagucauaauccaaccccaacaaauccucuucaccggaaacaaaacccaagucauacccaccaccgucgcagcaccaacccccgcccaagcacaaauaaccgccacuggccaacaacaaccccaagcccaaccagcccaaacacaagccccucuaguccuccaagucgacggcacaggcgacaccucauccgaagaagacgaagacgaagaggaagacuaugacgacgacgaagaagaagacaaagaaaaagacggagccgaagacggccaggucgaagaagaaccccucaacucugaagacgacguauccgacgaagaaggccaagaacucuucgacacagaaaacgucgucguaugccaauacgacaaaauccaucgcuccaaaaacaaauggaaauuccaccucaaagacggcaucaugaaccuaaacggacgcgacuacauauucuccaaagcaauaggcgacgccgaaugguaa

SEQ ID NO: 4504 - RNA, 1173 nt, Artificial Sequence
  AAH00125 variant
augccacccuccggccuccgccuccuacuccuccuccucccccuccucuggcuacucguacucacccccggccgccccgccgccggccucucaaccugcaaaaccaucgauauggaacucgucaaacgcaaacgaauagaagccauccgcggccaaauccuaucaaaacuccgccuagccuccccacccucccaaggagaagucccacccggcccccuccccgaagccguccuagcacuguacaacuccacccgcgaccgcgucgccggcgaaagcgccgaacccgaacccgaacccgaagccgacuacuacgccaaagaagucacccgcguacucaugguagaaacccacaacgaaauauacgacaaauucaaacaauccacccacuccaucuacauguucuucaacacguccgaacuccgagaagccguccccgaacccguccuccucucacgcgcagaacuccgacuacuccgucucaaacugaaggucgaacaacacguagaacucuaccaaaaauacuccaacaacucauggcgcuaccucuccaaccgccuacucgcaccaucagacagccccgaauggcucucauucgacguaacuggaguaguccgccaauggcuuucccgaggaggugaaaucgaaggauuccgucucagcgcccacugcuccugcgacucccgagauaacacccuacaaguggacauaaacggcuucaccaccggccgccguggagaccucgcuaccauacacggcaugaaccgaccuuuccuacuccugauggccacaccccuagaacgcgcccaacaccuacaauccagccgccaccgccgcgccuuagacaccaacuacugcuucuccucaaccgagaaaaauugcugcguccgccaacuauacaucgacuuccgcaaagaccuaggauggaaauggauccacgaacccaaaggcuaccacgccaacuucugccuaggaccaugccccuacaucuggucacuagauacccaauacuccaaaguccucgcacuauacaaccagcacaacccaggcgcauccgccgcccccugcugcguaccucaagcccucgaaccgcucccaauaguauacuacguaggucgcaaaccaaaagucgaacaacucuccaacaugaucguccgcuccugcaaaugcuccuga

SEQ ID NO: 4505 - RNA, 1704 nt, Artificial Sequence
  AAT70724 variant
augggccgcggccuccuccgcggacuauggccacuucacaucguccucuggacccgaaucgcguccacaauacccccacacguccagaaaagcgucaacaacgacaugaucgucacagacaauaauggcgcaguaaaguucccccaacucugcaaauucugcgacgugcgauucucgaccugcgacaaccaaaaauccugcauguccaacuguucgauaacuagcaucugcgaaaaaccccaagaagucugcguagccguauggcgcaaaaacgacgaaaacaucacacucgaaacugucugccacgacccaaaacucccauaccacgacuucauccuggaagacgcagcaucucccaaaugcaucaugaaagagaaaaagaaacccggcgagaccuucuucaugugcucaugcuccuccgacgaaugcaacgacaacaucaucuuuucagaagaauacaacaccuccaacccagaccuacuacucgucauauuucaggucacaggcauaucucuacucccaccacugggaguagccaucucaguuauaaucaucuucuacugcuaccguguaaaccgccaacaaaaacuauccuccacaugggaaaccggcaaaacccgcaaacuaauggaguucucagaacacugcgccauaauccuugaagacgaccgaucagacauauccagcacaugcgccaacaauaucaaccacaacaccgaacuacuccccauagaacucgacacccucgucggaaaaggucgcuucgccgaagucuacaaagccaaacucaaacaaaacaccuccgaacaauucgaaacaguagccguaaaaaucuucccuuacgaagaauacgcauccuggaaaaccgaaaaagacauauucuccgacaucaaccuaaaacacgaaaacauacuccaauuccucaccgccgaagaacguaaaacggaacuuggcaaacaauauuggcucaucaccgcguuucacgcuaaaggcaaccuccaagaauaccucacacgccacgucaucucgugggaagaucuaagaaagcucgggaguucccucgcacgaggcaucgcucaccuccacucggaccacacccccugcggccgucccaaaaugccaauaguccaccgagaccuaaaaucguccaacauacucgucaaaaacgaccugaccugcugccucugcgacuucggccucucucuccgucucgacccaaccuuaucagucgacgaccucgccaacuccggacaaguaggcacggcacgauacauggcaccagaaguccucgaaucacgcaugaacuuagaaaaugucgaaucauucaagcagaccgacgucuacuccauggcacucguacucugggaaaugaccucccgcugcaacgccgucggagaagucaaagacuacgaacccccuuucggaucaaaaguacgagaacaccccugcgucgaaucaaugaaagacaacguacucagggaccggggucgcccagaaauccccuccuuuuggcucaaccaccaaggcauccaaauggucugcgaaacccucaccgaaugcugggaccacgaccccgaggcccgccucaccgcccaaugcgucgccgaacgcuuuucggaacucgaacaccuagaccgacuaagcggcagaucaugcuccgaagagaaaaucccagaagacggcucccucaacacgacaaaauag

SEQ ID NO: 4506 - RNA, 2055 nt, Artificial Sequence
  BAG35778 variant
augauggacgcauccaaagaacugcaaguccuccacauagacuuccucaaccaagacaacgccgucucacaccacacaugggaguuccaaaccaguagcccagucuuccgucgcggucaagucuuccacuuacgccucguccucaaccaacccccacaaucauaccaucaacuuaaacucgaauuuucaacaggcccaaaccccagcaucgcaaaacacacccuaguaguacucgacccgagaacacccagcgaccauuauaacuggcaagcaacacugcaaaacgaaagcggcaaagaagucaccguugcagucaccucuucccccaacgcaauccucggcaaguaccaauuaaacgucaaaaccggcaaccacauacucaagucagaagaaaacauccucuaccuccucuucaacccauggugcaaagaagacauggucuucaugcccgacgaagacgaacgaaaagaauacauacucaacgacaccggcugccauuacguaggcgccgcccguucaaucaaaugcaagcccuggaacuucgggcaauuugagaaaaauguacucgacugcugcaucagucuccucaccgaauccagccucaaacccaccgaccgcagagaccccguccucguaugcagagccaugugcgccaugaugagcuucgaaaaaggacaaggcguccucauaggcaacuggacaggcgacuaugaaggcggcacagcaccauacaaguggacuggcucagccccaauccuacagcaguacuacaacaccaagcaagcagucugcuucggacaaugcuggguauucgccggaauccugaccaccguccuacgcgcacugggcaucccagcgcgcucaguaacaggcuucgacuccgcccacgacacggaacgcaacuuaacuguagauacguacguaaacgagaacggagagaaaauaaccuccaugacacaugacagcgucuggaacuuccacgucuggaccgacgccuggaugaaacgacccgaccuacccaagggauacgacggcuggcaagccgucgacgccacaccacaagaacggagccaaggcgucuucugcugcggaccaagcccccuaaccgccauacgaaaaggggacaucuucauagucuacgacacaagauucgucuucucugaagucaacggcgaccgccucaucuggcucguaaaaauggucaacggccaagaagaacuccacgucauuuccauggaaacaaccuccaucggcaaaaacaucuccacaaaggccgucggacaggaccgccgccgagacaucaccuacgaauacaaauaccccgaaggaagcuccgaagaaagacaggucauggaccacgccuuccugcuacucucaucagaacgagagcaccgccgcccaguuaaagagaacuuccuccacaugagcguccaauccgacgacguccugcugggcaacucagucaacuucacaguaauccucaaaagaaaaacagccgcccuucaaaacguuaauauacucggcagcuucgagcuccaacuauacaccggaaagaaaauggccaaacuaugcgaccucaacaaaacuagccaaauccaaggccaagucuccgaagucacucuuacccuagacuccaaaaccuacaucaacucccucgccauccuagacgacgaacccgucauacgcggauuuauaauagcugagaucguagaaagcaaagaaaucauggcuagugaagucuucaccuccuuccaauaccccgaguucuccaucgaacuccccaauacagguagaaucggucaacuccuagucugcaacuguaucuucaaaaacacccuagccauaccccucacagacgucaaauucagccucgaaagccucggcaucucaucccuccaaaccuccgaccacggcacaguccaaccgggcgaaaccauccagucccaaaucaagugcacacccaucaaaaccggacccaagaaauucaucgucaaacucuccagcaaacaagucaaggaaaucaacgcccagaaaaucguacucaucacaaaauaa

SEQ ID NO: 4507 - RNA, 3375 nt, Artificial Sequence
  CCDS6519.1 variant
auggacagccucgcaucacuggugcuuugcggcguaagccuccuccucucaggcacagucgagggcgccauggaccucauacuaaucaacagucucccccucguaucagaugccgagacgucacucaccuguauagccucaggcuggcgaccacacgagccuauaaccauaggaagagauuucgaggcccuaaugaaccaacaccaggacccucuugaaguuacccaagacgugacgcgagaaugggcgaaaaaggucgucuggaaacgagaaaaagcauccaaaauaaauggcgccuacuucugcgagggacggguuaggggcgaagccauccgcauacgcacgaugaaaaugcgccaacaagccuccuuccucccagcaacgcucaccaugaccgucgacaagggagacaacgucaacaucucauucaagaaaguacugaucaaagaagaggaugccgugaucuauaaaaacggcaguuucauccacagcgucccacgccacgaagucccagacauccuugagguacaccuaccgcacgcacaaccucaagaugccggagucuacagcgcgcgcuacauuggaggcaaccuuuucacaucugcuuucacccgccucauugucagaagaugcgaagcccaaaaaugggguccagaaugcaaccaccucuguacugccugcaugaacaacggcgucugccacgaagacacaggagagugcaucugucccccaggcuucaugggccggacgugcgaaaaagcaugcgagcuccacacauucggcagaaccugcaaagaaaggugcuccggccaagaaggaugcaaauccuacguauuuugccucccagacccauacggaugcuccugcgccaccggcuggaaaggacuccaauguaacgaagccugccaccccggauucuacggcccagauugcaaacugcgcugcucaugcaacaacggcgaaaugugugaccgauuccaagggugccucugcucccccgguuggcaggggcuacaaugcgaacgggaagguauacaaagaaugacacccaaaauagucgaucugcccgaccacauagaaguaaacagcggcaaauucaaccccaucugcaaagcaucaggauggccacucccgaccaacgaagaaaugacccucguuaaacccgacggcaccguacuccaccccaaagacuucaaccacaccgaccacuucucgguagccaucuucaccauccaccguauacuacccccagacuccgggguaugggucugcucaguaaauacagucgccgguauggucgaaaaacccuucaacaucagcguaaagguccuaccaaaaccccuaaacgcaccaaacgugaucgacaccgggcauaacuucgcgguaauaaacauaucaucagaacccuacuuuggagacggcccaaucaaaucaaagaagcugcuauacaaaccagucaaucacuacgaagccuggcaacacauucaagucaccaaugaaauagugacucucaacuaccuagagccccgaaccgaauacgaauugugcguucaacucguccgccguggagaaggcggcgaaggccacccggggcccguccguagauucacgacagccucgaucggacuuccaccgccaagaggccuaaaccuauugccgaagagucagaccacacuaaaccucacuuggcaaccaauauuucccucuucagaggacgacuuuuacguagagguagaacgccgauccguacaaaaaucagaccaacaaaauauaaaaguccccggaaaccuuaccuccguccuacuuaacaaccuccacccccgugagcaauacguaguucgcgcccgcgucaacacaaaagcacaaggagaauggagcgaagacuuaaccgcguggacccugucggacauacuaccaccccagcccgagaacaucaaaauaagcaacaucacccacucaucagccgucaucagcuggacgauccuggauggauacagcaucuccagcauuacgauacguuacaaaguccaagggaaaaacgaagaccaacacgucgaugucaagaucaaaaacgccaccauaacucaauaccaacugaagggccucgaacccgaaacagccuaccagguagacaucuucgcugagaauaauaucggaagcucaaacccagccuucagccacgagcuaguaacccuaccagaaucacaggcgccggccgaccucgguggaggcaaaaugcuacucauugccauacuaggaagcgccggcaugacuugucuaaccgugcuccuagcauuccucauaauacuccagcucaaacgagccaacguccagaggcgaauggcacaggcuuuccagaacgucagagaagaacccgccguccaauucaacagcggcacccucgcccucaaccgaaaggucaagaacaaccccgaccccacgauauaucccguucucgacuggaacgacaucaaauuccaggacguaaucggagaaggcaauuuuggccaaguacucaaagcccgaaucaagaaagacggccuuagaauggacgccgccaucaaacgaaugaaagaauacgccuccaaagacgaccaccgcgauuuugcaggcgaacucgagguccugugcaaacucggacaccacccgaacaucaucaaccuccugggggccugcgaacaccgcggcuaccucuaccuugccaucgaguacgcaccccacggcaaccuauuggacuuccuccgaaaauccagaguccuugagaccgacccagccuucgccaucgccaacucaaccgcuaguacacugucaucgcaacaacuacuacacuuugccgccgauguugcacgaggcauggacuacuuaagucaaaagcaauucauccaccgcgaccuugccgcacgcaacauccuaguaggcgaaaacuacguagcaaaaauugcagacuucggccugucccgaggacaggaagucuacguuaagaaaacgaugggacgccuccccgucagauggauggcaauagagucacuaaacuacagcgucuacaccacaaacagugaugucuggucauauggcgucuuacuuugggaaaucguuucgcucggaggcaccccuuauugcggcaugaccugcgcagaacucuaugagaaacuuccucaggguuaccgucucgaaaagccacuaaacugcgacgaugaaguauaugaccucaugcgacagugcuggcgggaaaaaccauacgaacgaccaucauucgcucaaauacuuguaagccucaaccgaaugcuagaagaacguaaaacauacgucaacaccacccucuacgaaaaauucacauacgccggcauagacugcucggccgaggaagccgcauag

SEQ ID NO: 4508 - RNA, 1791 nt, Artificial Sequence
  BAF84950 variant
auggccgacgccgaagcgcgcgcagaguuccccgaagaagcccgcccagaccgaggcacacuccagguacuccaagacauggcaucgcgccuacgcauucacuccauacgagcaacgugcuccacaagcucuggccaccccacaucaugcagcagcagcagcgaaauaaugagcguacucuucuucuacaucaugcgcuauaaacagagcgaccccgaaaaccccgacaacgaccgcuucguccucgcaaaacgccucuccuucguagacgucgccacaggauggcuaggccagggccucggcgucgcaugcggcauggcauacacuggaaaguacuucgaccgagccucuuaccgagucuucugccuaaugucagacggagaaucaucagaaggcagcgucugggaagcaauggccuucgccagcuacuacucacucgacaaccuagucgcaauauucgacguaaaucgccucggccacuccggggcccucccagccgaacacugcauaaacaucuaccaaagacgcugugaggcuuucggcuggaacaccuauguaguagacggucgcgacguagaagcccuaugucaagucuucuggcaagcaucacaagucaaacacaaacccaccgcggucguagccaaaacauucaaaggccgcggaacccccuccauugaagacgcagaaagcuggcacgcaaagccuaugccccgcgaacgagccgaugcuauaauuaaacuaaucgaaagccaaauccaaacgagccgaaaccuagacccacaacccccaaucgaagacucaccagaaguaaacauaaccgacguacgcaugaccucaccgcccgacuaccgagugggagacaaaaucgccacccgcaaggcuugcggccucgcgcuugcaaaacuaggauacgcaaacaaccgcgucguaguccuagacggagacacacgauacagcacauucuccgaaaucuucaacaaagaauaccccgaacgauucauagaaugcuucauggcagaacaaaacaugguaucagucgcccucggcugcgcaucccgaggccgaaccaucgcauucgccuccacauucgccgcauuccuaacacgcgccuucgaccauauacggaucggcggccucgcggaaucaaacaucaacaucauagguucgcacugcggagucucaguaggagacgacggagccucccagauggcccucgaggacauagcuauguuccgcaccauaccaaaaugcacaauauucuaccccacagacgccgucucaaccgaacacgccguggcacucgccgccaacgcaaaaggcaugugcuucauccgcaccacucgccccgagaccauggucaucuacacaccacaagaacgcuucgaaauaggccaagccaaaguccuccgacacugcguaagcgacaaagucaccguaaucggcgccggaaucaccgucuaugaagcccucgcagcagcagaugaacuaagcaaacaggacaucuucaucagagucaucgaccuguucaccaucaaaccccucgacgucgcaaccaucgucuccagugcaaaagcuaccgaaggccgaaucaucaccgucgaagaccacuacccccaaggcggcaucggcgaagcaguaugcgcagcagucucaauggacccagacauccaaguccacagccuagcggucucaggcguaccacaaucaggcaaguccgaagaacuacucgacauguacggcaucuccgcccgccacaucaucgucgcaguaaaaugcaugcuccuuaacuaa

SEQ ID NO: 4509 - RNA, 861 nt, Artificial Sequence
  EAW88722 variant
auggcagaggacggggaagaggcagaguuccauuucgcggccuuguacauaagcgggcaauggcccaggcucagggccgacaccgaucuccagcgcuugggcucgagcgcaauggcgcccucacgaaaguucuuugucgggggcaacuggaagaugaacggcaggaaacagagccuaggcgagcugauaggaacgcucaacgccgcgaaagugcccgcggacacagaaguaguaugugccccgccaacagcguauaucgauuucgcgcgccagaaacuggacccgaaaauagccguggcagcgcaaaacugcuauaaaguaaccaauggcgcguucacgggcgagaucucgcccgggaugauaaaagauugcggagccacaugggugguauugggccauagcgagcgcaggcacguguucggggagucggacgagcucauaggacaaaaaguggcccaugcauuggccgagggcuugggagugaucgcaugcauaggggagaaacuagacgaacgcgaggccgggaucacggaaaaggucguguucgagcaaacgaaagugauagcggacaaugucaaggacuggagcaagguggugcucgcguacgagccagugugggcgauagggaccgggaaaacggccacgccccagcaagcgcaagagguccacgaaaagcucaggggcuggcuaaaaagcaauguaucggacgcggucgcgcaaucgaccagaauaauauacgggggaucggucacgggcgcgaccuguaaagagcucgcaagccagccagauguggauggcuuucucgugggcggggccucacucaagcccgaguucguggacauuauaaaugccaagcaauaa

SEQ ID NO: 4510 - RNA, 357 nt, Artificial Sequence
  CAA72108 variant
augccccucgucgucgccgucauauucuucucccucugggucuucgcccucggccaacucgaacaacccgaaaucuccaucucccgccccgccaacaaauccgcccacaucuccuggaaagccuccauccaaggcuucuccuccaaaaucauccacugguacuggcaaaaacccaacaaaggccucgaauaccuccuccacgucuuccucaccaucuccgcccaagacugcuccggcggcaaaaccaaaaaacucgaagucuccaaaaacgcccacaccuccaccuccacccucaaaaucaaauuccucgaaaaagaagacgaagucgucuaccacugcgccugcuggauccgccac

SEQ ID NO: 4511 - RNA, 414 nt, Artificial Sequence
  EAL23985 variant
augcucucccuccuccacaccuccacccucgccguccuaggcgcccucugcgucuacggcgccggccaccucgaacaaccccaaaucuccuccaccaaaacccucuccaaaaccgcccgccucgaaugcguagucucaggcaucaccaucuccgccaccuccgucuacugguaccgcgaacgccccggcgaagucauccaauuccucgucuccaucuccuacgacggcacaguccgcaaagaauccggcauccccuccggcaaauucgaagucgaccgcauccccgaaaccucaaccucaacccucaccauccacaacgucgaaaaacaagacauagccaccuacuacugcgcccucugggaaguccacuccucccgccaauucgaacccucccacuccaucaacgucuacuaa

SEQ ID NO: 4512 - RNA, 366 nt, Artificial Sequence
  CAA30181 variant
augcucucccuccuccacaccuccacccucgccguccucggcgcccucugcgucuacggcgccggccaccucgaacaaccccaaaucuccuccaccaaaacccucucaaaaaccgcccgccucgaaugcgucgucuccggcaucaccaucuccgccaccuccgucuacugguaccgcgaacgccccggcgaagucauccaauuccucgucuccaucuccuacgacggcaccguccgcaaagaauccggcauccccuccggcaaauucgaagucgaccgcauccccgaaaccuccaccuccacccucaccauccacaacgucgaaaaacaagacaucgccaccuacuacugcgcccucugggaaguc

SEQ ID NO: 4513 - RNA, 366 nt, Artificial Sequence
  CAA33345 variant
augcucucccuacuccacaccuccacccucgccguccucggcgcccucugcgucuacggcgccggccaccucgaacaaccccaaaucuccuccaccaaaacccucuccaaaaccgcccgccucgaaugcgucgucuccggcaucaaaaucuccgccaccuccgucuacugguaccgcgaacgccccggcgaagucauccaauuccucgucuccaucuccuacgacggcaccguccgcaaagaaucaggcauccccuccggcaaauucgaagucgaccgcauccccgaaaccucaaccuccacccucaccauccacaacgucgaaaaacaagacaucgccaccuacuacugcgcccucugggaaguc

SEQ ID NO: 4514 - RNA, 2382 nt, Artificial Sequence
  AAA93251 variant
augauggcugcucucuacccaagcaccgaccuaucaggcgccucauccucgucacuccccucaagcccauccuccucaucaccaaacgaagucauggcgcucaaggacgucagagaggucaaagaagaaaacacccucaacgaaaaacucuuccuccucgcaugcgauaaaggagacuacuacauggugaaaaagaucuuagaagaaaacuccuccggcgaucuuaauauaaacuguguagacguacucggccgcaacgcaguaacuaucaccauugaaaacgagaaccucgacauccuccagcuacuccuugacuacggcugccaauccgccgaugcacuacucgucgccaucgacucagaaguaguaggcgcaguagacauccuccucaaccaccgccccaaacgaagcucccgacccaccaucguaaaacucauggaacgaauccaaaaucccgaauacuccaccacuauggacgucgccccaguaauccucgccgcccaccgcaacaacuacgaaauccucaccaugcuccucaagcaagacgucucccucccuaaaccacacgcgguuggaugcgagugcacacuuugcuccgccaaaaacaagaaagacucacuccggcacucacgcuuccguuuagacaucuaccgcugccuugcaucccccgcccuuauaaugcuaacagaggaagaccccauccugcgggccuucgaacucuccgccgaucuuaaagagcuaucacuugucgaaguggaguuccgaaacgacuacgaagaacucgcccgccaaugcaaaauguucgccaaggacuuacuagcucaagcacgaaacucccgcgaacucgaagucauccuuaaccacacaucuuccgacgaaccccucgacaaacguggccuucuagaagaacgcaugaaccucagccgacugaaacuagcaauaaaauacaaccaaaaagaguucgucucccaauccaacugccaacaguuccucaacacaguaugguucggacaaauguccggcuaccgccguaaacccacaugcaagaagaucaugaccguacucaccguaggcaucuucuggcccguccuuucgcucugcuacuugauagcacccaagucccaguucggcaggaucauccacacccccuucaugaaauuuauuauucacggcgccagcuacuucaccuuccuucuccuccuaaaucuuuacucccucguauacaacgaagacaagaagaacacaaugggccccgcccucgagcgcaucgauuaccuacugauccuguggaucauaggcaugaucuggagcgacauaaaacggcucugguacgagggccuugaagacuucuuagaagaaucacgaaaccaacugagcuucguaaugaacucucucuaucuugccacauucgcacuaaaaguugucgcccauaauaaauuccacgacuucgcugaccgaaaagacugggacgccuuccaccccacccuagucgccgaaggacuguucgccuucgccaacguccucuccuaccuucgccuauucuucauguacaccacuagcuccauucucggcccccuucaaauuucuaugggccaaaugcuacaagacuucgguaaguuccuaggaauguuucuccucgucuuauucuccuucaccaucggccucacccagcucuacgacaagggauacaccucuaaagaacagaaagacugcgucggcaucuucugcgaacaacaauccaacgacacuuuccacuccuucaucggcacuuguuucgcacuauucugguacauauuuucccucgcccacguagccauauucgucacccgcuucaguuacggcgaagaacuccaaucguuugucggcgccgucaucgucggaacguacaaugucgucgucguaauaguccuaacaaaacuucugguggccaugcuccacaaaucauuccaacuaaucgccaaccacgaggacaaagaauggaaauucgcacgcgccaaacucuggcucucauauuuugaugacaagugcacccucccacccccguucaacauaauccccagccccaaaacaauaugcuacaugauuagcucccucuccaaauggaucugcucccacacaagcaaagggaagguaaaacgccagaacucccucaaggaauggcgcaaccucaagcagaaacgcgacgaaaacuaccaaaaagucaugugcugccuaguacaucguuaccucacauccaugcgccagaaaaugcaaagcacugaucaagcuacgguagaaaaucucaacgagcuccgccaagaccucuccaaauuccgcaacgaaauucgggaccuucuagguuuucgcaccucaaaguacgccauguucuacccuagaaacuga

SEQ ID NO: 4515 - RNA, 3315 nt, Artificial Sequence
  AAZ73614 variant
augagcuuccgcgccgcccggcuguccaugcgcaaccggcgcaacgacacccucgacagcacccggacgcuguacuccagcgcgucccgcagcaccgaccuguccuacagcgaguccgaccucgugaacuucauccaggccaauuucaagaagcgggagugcgucuucuucaccaaggacagcaaggccaccgagaacgugugcaagugcggcuacgcccagucccagcacauggaggggacacagaucaaucagagcgagaaguggaacuacaagaagcacaccaaggaguuccccaccgacgccuuuggcgacauccaguucgagacccuggggaagaagggcaaguacauccgccuguccugcgacacggacgcggagauccucuacgagcugcugacccagcacuggcaccucaagaccccgaaccuggugaucagcgucaccgggggcgccaagaacuucgcccugaagccccggaugcgcaagaucuucucccggcucaucuacaucgcccagagcaaaggcgcguggauccugaccgggggcacgcacuacgggcuaaugaaguacaucggcgaggugguucgcgacaacaccaucucccggagcuccgaggagaacaucgucgccaucgggaucgccgccuggggcauggugagcaaccgcgacacacucauccggaacugcgacgccgagggcuacuuccuggcgcaguaccugauggacgacuucacgcgcgacccccucuacauucuggacaacaaccacacccaccuccuccugguggacaacgggugccacggccaccccaccgucgaggccaagcugcggaaccaacucgagaaguacaucagcgagcgcaccauccaggacuccaauuacgggggcaagaucccgaucgugugcuucgcacaaggcgggggcaaggagacguuaaaggccaucaacaccagcaucaagaacaagauccccugcguggucguggagggguccggccagaucgccgacgugaucgcgagccuggucgagguggaggacgcccucacuuccagcgccgugaaggagaagcugguccgguuccugccccgcaccgugucccggcuccccgaggaggagacagagagcuggaucaaguggcugaaggagauccuggagugcucccaccuccugaccguaaucaagauggaggaggccggggacgagaucgucagcaacgccaucuccuacgcgcuguacaaggccuucagcaccuccgagcaggacaaggacaacuggaacggccagcucaagcugcugcucgaguggaaccaguuggacuuggccaacgacgagaucuucaccaacgaccggcgcugggagagcgccgaccuccaggaggugauguucacggcccuaaucaaggaucggccgaaguucgugcgcuuauuccucgagaacggccugaaccugcggaaguuccucacccacgacguccugaccgagcuguucuccaaccacuuuagcacccugguguaccgcaaccuccagaucgcgaagaacucuuacaaugacgcccugcugacguucgucuggaagcugguggccaacuuccggcgcggcuuucggaaggaggaccgcaacggccgggacgagauggacaucgagcugcacgaugugagccccaucacccgccacccccugcaggcccuauucaucugggcgauccugcagaacaagaaggagcuguccaaggucaucugggagcagacccggggcugcacccucgccgcccugggcgccagcaagcuguugaagacgcuggccaaggucaagaacgacauuaacgcggccggggagucugaggagcuggccaacgaguacgagacccgcgccguggagcuguucaccgagugcuacuccagcgacgaggaccuggccgagcagcugcucgucuacuccugcgaggcguggggcggcagcaacugccuggagcuggccguggaggccaccgaccagcacuuuaucgcccagcccggggugcaaaacuuccucuccaagcagugguacggcgagaucagccgggacaccaagaacuggaagaucauccugugccuguucaucaucccgcucgucgggugcggcuucguguccuuccguaagaagcccguggacaagcacaagaagcugcugugguacuacgucgccuuuuucacgagccccuucgugguguucuccuggaacgucguguucuacaucgcguuccuccugcuguuugccuacgugcuccugauggacuuucacagcgucccccacccucccgagcuggugcucuacucccugguauucguccuguucugugacgaggugcggcagugguacgugaacggggucaacuacuucaccgaccucuggaacgugauggacacccugggccuguucuacuucaucgcuggcaucguguuccgccuccacagcuccaauaagagcucccuguacagcgggcgggucaucuucugccuggacuacaucaucuuuacccuccgccugauccacaucuucacggugucccggaaccugggccccaaaaucaucaugcuccagcguaugcucaucgacguguucuucuuccuguuccucuucgccgucuggaugguggcguucggggucgcccgccagggcauccugcggcagaacgaacagcgcuggcgguggaucuuccgcagcgucauuuacgagcccuaccuggccauguucggccaggugccgagcgacguggacgggaccaccuacgacuucgcccacugcaccuuuacggggaacgaguccaagccccucugcgucgagcuggacgagcacaaccugccccgguuccccgaguggaucaccaucccgcucgugugcaucuacaugcugagcaccaacauccugcucgucaaccugcuggucgccauguucggguacaccgugggcacggugcaggagaacaacgaccaggucuggaaguuucagcgcuacuuccucgugcaagaauacugcucccggcugaacauccccuuccccuucaucguguucgcguacuucuacaugguugugaagaagugcuucaagugcugcugcaaggagaagaacauggagagcuccgugugcugcuucaagaacgaggacaacgagacccuggccugggagggggucaugaaggagaacuaccucgugaagaucaacaccaaagccaacgacaccagcgaggagaugcgccaccgguuccgccagcuggacacaaagcugaacgaccucaagggccugcugaaggagaucgccaauaagaucaaguga

SEQ ID NO: 4516 - RNA, 2097 nt, Artificial Sequence
  AAK13079 variant
augaugcgcucccgcucaaaaagcccccgccgccccagcccaacagcccgaggcgcaaacugugacguagaacuccuaaaaacgaccacaagggaccgagaagaacucaaaugcaugcuagaaaaauacgagagacaccuagccgagauucaaggaaacgucaaggugcuaaaauccgaacgcgacaaaauauucuugcucuacgaacaggcacaagaagaaauaacacgguuacgaagagaaaugaugaaaagcuguaaguccccaaaaucaaccaccgcgcacgcaauacucaggcgcguagaaaccgaacgcgacgucgccuucaccgaccugcgccgcaugaccacggaacgagacagccuacgagaaagacugaagaucgcccaggaaaccgccuuuaacgaaaaggcgcaccuagaacagcguauagaagaacucgagugcaccguacacaaucucgacgacgaaaggauggaacaaaugagcaacaugacccucaugaaagaaacaaucagcacagucgaaaaagagaugaaaagccuagcgaggaaagccauggacaccgaaagcgaacucgggcgccaaaaagcagaaaacaacucccuacggcuccuguacgagaauaccgaaaaggaccucagcgauacucaacgccaccucgccaaaaagaaauacgaacuacaacuaacacaagaaaagaucaugugccucgaugagaaaaucgacaacuucaccagacaaaacauagcacagcgcgaagaaaucucgauacucgggggcacacucaacgauuuggcaaaagagaaagagugccuccaggcaugccuagacaagaaauccgaaaacauagccucccuaggagaaucgcuagcaaugaaagagaaaaccaucuccggcaugaaaaacauaaucgcagaaauggaacaagcaucgcgccaaugcacagaagcgcuuauagucugcgaacaggacgucucccgaaugagacgccagcucgacgaaacgaacgacgaacuagcccagauagcacgcgaacgcgacauacuagcacacgacaacgacaaccugcaggaacaauucgccaaagccaaacaggaaaaccaagcacucucaaagaaacucaacgacacgcacaacgaacuuaacgauaucaaacaaaaaguacaggacacaaaccuagaaguaaacaaacucaaaaacauccuaaaauccgaagaaagugagaaucggcaaaugauggaacaauuacgaaaggcaaacgaggacgcagagaacugggaaaacaaagcaagacaaagcgaagccgacaacaacacgcucaaacuugaacuaaucacggcagaagccgagggcaaccgacuaaaggaaaaagucgacagccuaaaccgagaagucgaacagcaucucaacgccgagagguccuauaagucccaaaucagcacgcuccacaaaucaguagucaaaauggaagaagaacuacaaaaaguacaauucgaaaaaguaagcgcgcuagccgaccuaagcagcacccgagaacuaugcaucaaacucgacagcagcaaggaauuacucaaccgucaacucguggcaaaagaccaggaaauagaaaugcgcgaaaacgagcucgacagcgcacacagcgaaauagaacugcuacggagccagauggcaaacgaacgaauaagcaugcaaaaccucgaggcccugcuaguagccaaccgcgacaaggaauaccaaagccaaauagcacuacaggaaaaagagagcgaaauacaauuacuaaaggagcaccucugccucgcagaaaacaagauggccauacaaagcagagacgucgcccaguuccgcaacgucgucacccaacuagaagcugaccuagacaucacgaaacgacaacucggcaccgaaagguucgaacgagaacgcgccguacaagaacugcgacggcaaaacuacagcuccaacgcauaccacaugagcuccaccaugaaacccaacacaaaaugccacagcccagaaagagcgcaccaccgcucgccggaccgcgggcucgaccgcagccucgaagagaaccugugcuaccgagacuucuga

SEQ ID NO: 4517 - RNA, 927 nt, Artificial Sequence
  CCDS48205.1 variant
augcggcccgaaggaagccucacauaccgcguccccgaacgccuacggcaaggcuucugcggcgucggccgagcagcacaagcccucgucugcgcgagcgcaaaagaaggcacagccuuccgaauggaagcgguacaagaaggcgcagccggcguagaaucggaacaagccgcccuaggcgaagaagccguacuccuccuagacgacauaauggcagaaguagaaguaguagccgaagaagaaggccuaguagaaagaagagaagaagcacaaagagcacaacaagccguccccggccccggccccaugacacccgaaagcgcaccagaagaacuccuagccguccaagucgaacucgaaccaguaaacgcacaagcacgcaaagccuucagccgacaaagggagaaaauggaacgccggcgcaaaccccaccuagaccgccgaggcgcagucauccaaucaguccccggcuucugggccaacguaaucgccaaccacccccaaauguccgcccucauaaccgacgaagacgaagacaugcucagcuacauggucucacucgaagucggcgaagaaaaacaccccguacaccucugcaaaauaaugcuauucuuccgaagcaaccccuacuuccaaaacaaaguaaucacaaaagaauaccucguaaacaucaccgaauaccgagccagccacucaaccccaauagaaugguaccccgacuacgaagucgaagcauaccgcagacgacaccacaacagcucccucaacuucuucaacugguucuccgaccacaacuucgccggcagcaacaaaaucgccgaaauccugugcaaagaccucuggcgaaacccacuacaauacuacaaacgaaugaaaccacccgaagaaggaaccgaaaccagcggagacucacaacuccucuccuga

SEQ ID NO: 4518 - RNA, 369 nt, Artificial Sequence
  M13231.1 variant
augcgcugggcccuccucguccuccucgccuuccucucccccgccucccaaaaauccuccaaccucgaaggccgcaccaaauccgucacccgccaaaccggcuccuccgccgaaaucaccugcgaccucacagucaccaacaccuucuacauccacugguaccuccaccaagaaggcaaagccccccaacgccuccucuacuacgacgucuccaccgcccgcgacguccucgaauccggccucucccccggcaaauacuacacccacaccccccgccgcugguccuggauccuccgccuccaaaaccucaucgaaaacgacuccggcgucuacuacugcgccacaugggaccgccaaaaacuccucuaa

SEQ ID NO: 4519 - RNA, 804 nt, Artificial Sequence
  CCDS12619.1 variant
augggcgcacgacaaauacaaacaagcucaucccaaacaucccccgaagaagccaugggcacaccccgaauccaacaccuccucauccuucucguucucggcgccucccuccucaccucuggccuagaacucuacugccaaaaaggccuauccaugaccgucgaagccgaccccgccaacauguucaacuggaccaccgaagaaguagaaaccugcgacaaaggcgcccucugucaagaaaccauccucauaaucaaagccggcaccgaaaccgccauccucgccacaaaaggcugcauccccgaaggugaagaagccaucacaaucguccaacacuccucaccacccggccucaucguaacauccuacuccaacuacugcgaagacuccuucugcaacgacaaagacucccuaucccaauucugggaguucuccgaaaccaccgcaucaaccguauccaccacacuccacugcccaaccugcgucgcccuaggaaccugcuucuccgcccccucccuccccugccccaacggcaccacccgcugcuaccaaggcaaacucgaaaucaccggcggcggcaucgaaucauccgucgaaguaaaaggcugcaccgccaugaucggcugcagauuaauguccggcauccucgccgucggccccauguucguccgagaagccugcccccaccaacuacucacccaaccccgaaaaaccgaaaacggcgcaaccugccuacccauccccgucuggggccuacaacuccuucucccccuccuacuacccuccuucauacacuucuccuaa

SEQ ID NO: 4520 - RNA, 1590 nt, Artificial Sequence
  AHZ44440 variant
augcuccucgccguccucuauugucuucucuggucauuccaaacguccgccggacauuucccacgcgccugcgucuccuccaaaaaucuaauggaaaaagaaugcugucccccauggucaggcgaucgaucaccuugcggccaacucuccggacgcggauccugccaaaacauccuacuuuccaacgcuccccucggcccccaauuccccuucacgggagucgacgaccgcgaauccuggccaucagucuucuacaaccgaaccugccaaugcucaggcaacuucaugggcuucaacugcgguaacugcaaguucggcuucuggggaccaaacugcaccgaacgccgccuacucguacgccgaaacaucuuugacuuauccgcacccgaaaaagacaaauucuucgcauaccucacccucgcaaaacacaccaucucuagcgacuacgucauccccaucggaacauacggucagaugaaaaacggcuccacacccauguucaacgacauuaauaucuaugaccucuucgucuggaugcacuacuacguauccauggacgcccuccugggcggcuccgaaauauggcgagacaucgauuucgcgcacgaagcaccagccuuucuccccuggcauagacucuuucugcuccgcugggaacaagaaauccaaaaacucaccggcgacgaaaacuucacaaucccauacugggacuggcgcgacgccgaaaaaugcgacaucuguaccgacgaauacaugggagggcaacacccaacaaaccccaaccuucucuccccugcuuccuucuucuccuccuggcaaauagucugcucucgccuagaagaauacaacucccaccaaucccuuugcaacggcacacccgaaggcccacuccgacgcaaccccggaaaccacgacaaaagccgcacaccccgccuccccucuuccgccgacgucgaauuuugccucucacucacccaauacgaauccggcuccauggauaaagcagccaacuucaguuuccgcaacacccuugaaggcuucgccucaccccucacaggcaucgccgacgccucccaauccuccaugcacaacgcccuccacaucuacaugaacggcaccaugucccaaguccaaggcuccgccaacgacccaaucuuccuccuacaccacgccuucgucgacuccauauucgaacaauggcuacgccgacaccgaccccuacaagaagucuacccagaagcaaacgccccaauacgccacaaucgugaaucauacaugguccccuucauaccccucuaccgcaacggagacuucuucauauccagcaaagaccucggcuacgacuacuccuaccuccaagacagcgaccccgacuccuuccaagacuacaucaaaucauaucucgaacaagccucccgaaucugguccuggcuccucggugccgcaauggucggcgccguccucacagcccuacuagccggccuagucucccuccugugccgacacaaacgcaaacaacuccccgaagaaaaacaaccccuccucauggaaaaagaagacuaccacucucuuuaccaaucccaccucuaa

SEQ ID NO: 4521 - RNA, 1590 nt, Artificial Sequence
  AGV39051 variant
augcuccucgcuguacuauacugcuuacucuggucauuucaaacaucagccggacauuucccgcgcgcaugcgucuccuccaaaaaccuuauggaaaaagaaugcugcccaccauggucaggcgaccgcucccccugcggucagcucuccggccgcggaucaugucaaaacauccuccuaucaaacgcaccccucggcccccaauuccccuucaccggaguagacgaccgcgaaagcuggccauccgucuucuauaaccgaaccugccaaugcucaggaaacuucaugggguuuaacugcggcaacugcaaauucggauucuggggcccgaacugcacggaacgccgucuacugguccgccgcaacaucuucgaccuauccgccccagaaaaagauaaauuuuucgccuaccucacccucgccaagcacaccaucucauccgacuacgucauccccaucggcaccuacggccaaaugaaaaacggauccacccccauguuuaacgacaucaacauuuacgaccucuucguauggaugcacuauuacguauccauggacgcccuccuaggcggaucagaaaucuggcgcgacauagacuuugcccacgaagcaccagccuuccuucccuggcaccgacucuucuuacuccgaugggaacaagaaauccaaaaacuaaccggcgacgaaaacuucaccauccccuacugggacuggcgugacgccgaaaaaugcgacauaugcaccgaugaauacaugggaggccaacauccaaccaaccccaaccuccucagcccggccucguucuucuccagcuggcaaauagucugcucccgccuagaagaauacaacagccaccaaagccucugcaacggcacacccgaagggccccuacgacgcaaccccggcaaccacgacaaaucacguacaccccgccuccccuccuccgccgacgucgaguucugccucucccucacacaauacgaaagcggaucaauggacaaagccgcaaacuuuucauuccgaaacacucuggaaggauucgcaucaccccucacaggcauagccgacgccagccaaucauccaugcauaacgcccuacacaucuauaugaacggaaccaugagccaaguccaaggcucugcgaacgaccccaucuuccuccuccaccacgccuucguagacuccauauucgaacaauggcuccgccgccaccgcccccuccaagaagucuaccccgaagcaaacgcccccaucggccacaaccgcgaauccuacaugguucccuucaucccccuauaccgcaacggagacuucuucaucucuuccaaagaccucggcuacgacuacuccuaccuacaagacucugacccugacuccuuccaagacuacaucaaaucauaucucgaacaagccucacgcaucugguccuggcuacucggcgccgcaauggucggcgccguccuaacagccuuacucgccggcuuaguaucccuucuaugccgccacaaacguaaacagcucccagaagaaaaacaaccccuccucauggaaaaggaagacuaccacucacucuaccaaucccaccucuga

SEQ ID NO: 4522 - RNA, 1590 nt, Artificial Sequence
  AGV39049 variant
augcuccucgccguccucuacugccuccucugguccuuccaaacauccgcaggacacuucccccgugcuugugucuccuccaaaaaccuaauggaaaaagaaugcugcccacccuggucaggagacagauccccaugcggccaacuaucaggccgaggcuccugccaaaacauacuacuauccaacgcgccccucggcccccaauucccauucacuggggucgacgaccgugaaucauggcccucuguauucuacaaccgcaccugucagugcucaggaaacuucaugggauucaacugcggaaacugcaaauucggcuucuggggccccaacugcaccgaacgccgccuacucguccgccgcaacaucuucgaucucucagccccagaaaaggacaaauucuucgccuaccuaacccucgccaaacacacaaucagcucugacuacgucauacccaucggcaccuacggccaaaugaaaaacggcuccacccccauguucaacgacauaaauaucuacgauuuauucgucuggaugcacuauuacgucuccauggaugcccuccuaggcggcagcgaaaucuggcgggacaucgacuucgcacacgaagcccccgccuuccuccccuggcaccgccucuuucuccuccgaugggaacaagaaauccagaaacuaaccggugacgaaaacuucaccauucccuacugggacuggcgcgacgcagaaaaaugcgacauaugcacagacgaauacaugggcggacaacaccccacaaaccccaaccuacuaucucccgccuccuuuuucuccucuuggcaaauugucugcucccgacucgaagaauauaacucacaccaaucccucugcaacggcacccccgaaggcccccuccgccguaaccccggcaaccacgacaaauccagaacuccccgccuuccauccucagccgacguagaauuuugccuuucccucacccaauacgaauccggcuccauggacaaagccgccaacuucuccuuccguaacacccuagaaggcuuugccucaccacuuaccggcaucgccgacgccucccaauccuccaugcacaacgcccuacacauauacaugaacggaaccaugucccaaguccagggguccgcgaaugacccaaucuuccuacuccaccacgccuucgucgacucuaucuuugaacaauggcuacaacgacaccgaccccuccaagaaguauacccagaagccaacgccccuaucggccacaaccgcgaaucuuauaugguccccuucaucccccuauaccgcaacggggacuucuucauauccucgaaagaucucggcuacgacuacuccuaccuccaagauuccgauccagacuccuuccaagacuacaucaaauccuaccucgaacaagccucacgcaucugguccuggcuccuuggugcagccauggucggagccguccuuaccgcacuucuugccggacuggucagccuccuaugccgccacaaacgcaaacaacugcccgaagagaaacaaccacuccucauggaaaaagaagacuaccacucccucuaccagucucaccucuag

SEQ ID NO: 4523 - RNA, 1590 nt, Artificial Sequence
  AGV39050 variant
augcugcuagccguccuauacugccucuuauggucauuccaaaccuccgccggccauuucccccgagccugcguaucaucaaagaaccucauggaaaaagaaugcuguccacccuggucaggagaucgcucacccugcggccaacuaucaggccgaggcucuugccaaaacauccuccucucaaacgcaccccucggcccccaauuccccuucaccggcgucgacgaccgcgaaucuuggccaagcgucuucuacaaccgcacaugccaaugcucaggcaacuucaugggguucaacugcggcaacugcaaauucggcuucuggggccccaacugcaccgaacgccgccuuuuaguccgccgcaacauauucgaccucuccgcccccgaaaaagauaaauuuuucgccuaccucacacucgccaaacacaccauauccuccgacuacgucauccccaucggcaccuacggccaaaugaagaacggcuccacaccaauguucaacgacaucaacauauacgaccucuucgucuggaugcacuacuaugucuccauggacgcccuacucggcggauacgaaaucuggcgagacaucgacuucgcgcacgaagccccagccuuccuccccuggcaccgccuuuuccuccuccgcugggaacaagagauacaaaaauuaacaggcgacgaaaacuucaccaucccauacugggacuggcgcgacgccgaaaaaugcgacaucugcaccgacgaauacaugggcggccaacaccccacaaacccuaacuuacuuuccccagcauccuucuucagcuccuggcaaaucgucugcucccgucuagaggaauacaacucccaccaaucccuaugcaacggcaccccagaaggcccgcuccgccgcaaccccggaaaccacgacaaaucccgcacuccccggcuccccucauccgccgacguugaguucugccugucacucacccaauacgaauccggauccauggacaaagcugcaaacuucuccuuccgcaacacccuugaaggcuucgccagcccccuuaccggcaucgccgacgcaucccaaucguccaugcacaacgcacuccacaucuacaugaacggcaccaugucccaaguacagggcucagccaacgaucccaucuucuugcuacaccacgccuucgucgacuccaucuucgaacaauggcuacgccgacaccgcccacuccaagaagucuaccccgaagcaaaugccccuaucggccauaaccgcgaaucauacaugguccccuucaucccccucuaucgcaacggcgacuucuucaucagcuccaaagaucucggauacgacuacuccuaccuacaagacuccgaccccgacucauuccaagacuacaucaaauccuaccucgaacaggcuucccgcaucugguccuggcuucuaggcgccgccaugguaggagcaguacucaccgcccuacuggccggacucguuucacuucuuugccgacacaagagaaaacaacucccagaagaaaaacaaccccuccuuauggaaaaagaagacuaccacucccuuuaccaaucccaccucuaa

SEQ ID NO: 4524 - RNA, 714 nt, Artificial Sequence
  CAA04137 variant
auguccccacuaugguggggcuuccuccucuccugccucggaugcaaaauccuccccggcgcccaaggacaauucccccgcgucugcaugaccgucgacucacucguaaacaaagaaugcugcccacgccucggcgccgaauccgccaacgucugcggaucccaacaaggccgcggccaaugcacagaaguccgcgccgacacccgccccuggucaggacccuacauccuccgcaaccaagacgaccgcgaacuauggccccgcaaauucuuccaccgcaccugcaaaugcaccggcaacuucgccggcuacaacugcggcgacugcaaauucggauggaccggccccaacugcgaacgcaaaaaaccccccgucauccgccaaaacauccacucccucuccccacaagaacgcgaacaguuccucggcgcccucgaccucgcaaaaaaacgcguccaccccgacuacgucaucacaacacaacacugggucggccuacuaggccccaacggcacccaaccccaauucgccaacugcuccgucuacgacuucuucgucuggcuccacuacuacuccguccgcgacacccuccucggcggcuucuuccccuggcucaaaguauacuacuaccgcuucgucaucggacuccgcgucuggcaaugggaagucaucuccugcaaacucaucaaacgcgccaccacccgccaacccuaa

SEQ ID NO: 4525 - RNA, 1590 nt, Artificial Sequence
  AAA61242 variant
augcuacucgcuguccuauacugccuccucuggagcuuccagacaagcgcaggccacuucccccgagcaugcgucuccuccaaaaaccucauggaaaaggaaugcugcccaccaugguccggugaccgaucaccaugcggccaacucuccggccgaggcucaugccaaaacauccuccucuccaacgcgccgcucggcccacaauuccccuucacaggcguagacgaccgagaauccuggcccuccguauucuacaaucgaaccugccaaugcuccggaaacuucaugggguucaacugcgguaacugcaaauucggcuucuggggccccaacuguacagaacgccgccuccuagucagaaggaacauauucgaccucucagccccugaaaaagacaaauucuuugccuaccuaacccuagccaaacauacaaucucauccgacuacgucauaccaaucggcacauacggucaaaugaagaacggcucaacccccauguuuaacgacaucaacaucuacgaccuuuucgucuggaugcacuacuacgucagcauggacgcgcuccuuggaggaagcgaaaucuggcgcgacaucgacuuugcccacgaagcaccagcauuccucccuuggcaccgacucuuccuccuacgcugggaacaagaaauccaaaaacucacaggcgacgaaaacuucacaaucccauacugggacuggcgcgacgccgaaaaaugcgacauaugcaccgacgaauacaugggcggccaacacccaaccaacccaaacuuacucucccccgcauccuucuucuccuccuggcaaaucgucugcucacgccuagaagaauacaacucccaccaaucccuaugcaacggaacccccgaaggcccccuccgcagaaaccccggcaaccacgacaaaagccgcaccccucgccuacccuccuccgcugacguagaguucugccucucccucacacaguacgaaucuggcagcauggauaaagccgcuaacuucuccuucagaaacacccucgaaggcuucgccagcccccuuaccggaaucgccgacgccucccaauccuccaugcacaacgcacuccacaucuacaugaacggcaccaugucccaaguccaagguuccgccaacgaccccaucuuccuccuccaccaugccuucguagacuccauauucgaacaauggcuucgacgccaccgcccgcuacaggaaguauacccugaagcaaaugcccccauaggccacaaccgcgagucauacauggucccuuucaucccccucuaccgcaacggcgacuucuucauauccuccaaggaccuaggauacgacuauagcuaccuccaagacagcgacccagacuccuuccaagauuacauaaaaucauaucucgagcaagcuagccgaaucugguccuggcuccucggcgccgccaugguaggagcaguccucacugcccuucucgccggccucgucucacuacucugucgccacaaaagaaaacaacuaccagaagaaaaacaaccccuccucauggagaaagaagacuaccacucccucuaccaaucccaccucuaa

SEQ ID NO: 4526 - RNA, 1590 nt, Artificial Sequence
  AGV39054 variant
augcucuuagccgugcuauacugccuccuauggucauuccaaaccuccgcgggacacuucccccgcgccugcguauccuccaagaaccucauggaaaaggaaugcugcccacccugguccggcgaccgcucccccugcggacaacuuuccggccgcggguccugccaaaacauccuacucagcaacgcaccccucggaccccaauuccccuucacuggcgucgacgaccgagaauccuggccauccgucuucuacaaccggaccugccaauguucagggaacuucaugggcuucaacuguggaaacugcaaguucggcuucuggggacccaacugcaccgaacgccgccuccucguacgcagaaauauauucgaccuauccgcccccgaaaaagacaaauucuuugcauaccuaacccuggccaaacauacaaucuccuccgacuacguuauccccauuggcaccuacggacaaaugaaaaacggcuccacacccauguucaacgacaucaacauuuacgaccuauucgucuggaugcacuacuaugucuccauggacgcccuccucggcggcuccgaaaucuggcgcgauauagacuucgcacacgaagcaccagccuuucuccccuggcaccgacucuuccuccuacgaugggaacaagaaauacaaaagcucaccggagacgaaaacuuuacaaucccauacugggacuggagagacgccgaaaaaugcgacauaugcacagacgaauacgucggcggccaacaccccacaaaccccaaccuccucucccccgcaucauucuuuucaucauggcagaucgucuguuccagacuagaagaauauaacucccaccaaucccucugcaacggcacaccugaagguccccuccgucgcaaccccggcaaccacgacaaaucccgcacaccccgccuaccuuccucggcagaugucgaguucugccucucccucacccaauacgaaucaggauccauggacaaagccgccaacuucuccuuccguaacacccuugaaggcuuugcauccccacugaccgguauagccgacgcaucccaauccuccaugcacaacgcacuccacauauacaugaacggcaccaugucacaaguccaaggcuccgccaacgaucccaucuuccuacuccaccacgccuucgucgacuccauauucgaacaauggcuccgacgccaccgaccccuccaagaagucuaucccgaagccaacgcccccauaggucacaaccgcgaauccuacaugguucccuucaucccccuuuaccgcaacggcgacuucuucauaucauccaaagaccucggcuacgacuacucuuaccuccaagacucggaccccgacuccuuccaagauuacaucaaaucauaccucgaacaagccucacggauuuggagcuggcuccucggcgccgccauggucggagcaguccuaaccgcacuccuagcuggccuaguaagucuccuaugccgacacaaacgcaaacaacuucccgaagagaaacaacccuuacuuauggaaaaagaagacuaccacucacucuaccaaucucaccucuaa

SEQ ID NO: 4527 - RNA, 1590 nt, Artificial Sequence
  AGV39162 variant
augcuccuagcaguccucuacugccuucuauggucauuucaaaccuccgccggccauuucccccgcgccugcgucuccucgaaaaaccucauggagaaagaauguugucccccauggagcggagaccgcucacccugcggacaacucuccggccgaggcuccugccaaaacauccuacucucaaacgcuccccuaggcccccaauucccauucaccggagucgacgaccgcgaauccuggcccucuguauucuacaaccgaaccugccagugcuccgggaacuuuaugggcuucaacugcggcaacugcaaauuuggcuucuggggaccaaacugcaccgaacgccgccuccuaguccguagaaacaucuucgaccucuccgccccagaaaaagacaaauucuucgccuaccuaacccucgccaaacacaccaucuccucagacuacgucauccccaucggcaccuacggccaaaugaaaaacggcuccaccccaauguucaacgacaucaacauuuacgaccuauucguuuggaugcacuacuacgucuccauggacgcccucuuaggaggcucggaaauuuggcgagacaucgacuucgcucacgaggcacccgcuuuccuucccuggcaccgccuauuccugcuacgaugggaacaagaaauccagaaacucaccggcgacgaaaacuucaccauuccauacugggauuggcgcgacgccgaaaaaugcgacaucugcacagacgaguacauggguggucaacaccccacaaaccccaaccuucugucacccgcauccuucuuuuccuccuggcaaaucguaugcucccgccuagaagaauacaacucccaucaaucacucugcaacggcacacccgaaggcccacuccgccguaaccccggcaaccaugacaaaucccgcacaccucgccuccccucuagcgccgacgucgaauuuugccuaucccucacccaauacgaauccggcucaauggauaaagcagccaauuucuccuuccgcaacacccuugaaggcuucgccucgccccuaacaggcaucgccgacgcaucccaauccuccaugcacaacgcccuccacaucuacaugaacggaacaaugucccaaguucaaggcucagcaaacgauccaaucuuccuccuccaucacgcauucgucgacucaaucuucgaacaauggcuccgccgccaccgccuccuacaagaagucuaccccgaagcaaacgcaccuaucggccacaaccgcgaaucauacauggucccauucaucccccucuaccgcaauggcgacuucuucaucuccuccaaagaccucggauacgauuauuccuaccuccaagacuccgaccccgacuccuuucaagacuacauuaaaucauaccucgaacaagcauccagaaucuggucuuggcuacucggagcugccauggucggcgccgugcucacagcccuccucgccggacucgucucacuucucugccgccacaaacgcaagcaacuaccugaagaaaaacaaccacuccucauggaaaaagaagacuaucacucccucuaccaaucccaccucuaa

SEQ ID NO: 4528 - RNA, 1590 nt, Artificial Sequence
  AGV39086 variant
auguuacucgcaguccucuacugccuacucuggucauuucaaaccuccgccggacacuuccccagagcaugcgucuccagcaaaaaccucauggaaaaagaaugcuguccacccugguccggcgaccgaucacccugcggacaacuguccggccgcggauccugccaaaacauccuccuaucaaacgcgccccucggaccccaauuccccuucaccggggucgacgaccgugaaucuuggcccuccgucuucuacaaccgcacaugccagugcuccgguaacuucaugggcuucaauugcgguaacugcaaauucggcuucuggggccccaacuguaccgaacgucgccuccucguccgccgcaacauauucgaccuaucagccccugagaaagacaaauucuucgcguaccucacccucgccaaacacaccaucuccucugacuacguaaucccaauugguaccuacggccaaaugaaaaacggcuccacccccauguucaacgacaucaacauauacgaccucuuugucuggaugcacuacuacguuuccauggacgcacuacucggcggcagcgaaauauggcgagacaucgacuucgcccacgaagcccccgcuuuccuaccauggcacagacucuuccuacuccgcugggaacaggaaauccagaaacucacaggcgacgagaacuucacaauccccuacugggacuggcgcgacgcagagaaaugcgacaucuguaccgacgaauacaugggcggccaacaccccaccaacccaaaccuccuaucccccgcauccuuuuucuccuccuggcagauagucugcagccgacucgaggaauacaacucccaccaaucucucugcaacgguacacccgaaggcccccuucgucguaaccccggcaaccacgacaaaucccgcacacccagacuccccuccucagccgacgucgaguucugccucucacucacccaauacgaaucuggaagcauggacaaagccgccaacuucuccuuccgcaacacccucgaaggcuucgccucucccuuaaccggcaucgcagacgccagccaguccuccaugcacaaugcucuccacaucuacaugaacggcaccaugagccaaguccaaggcucagccaacgacccgaucuuccuacuacaccacgcauucgucgauucaauguucgaacaauggcuccgccgccaccguccacuacaagaagucuacccagaagcaaacgcccccauaggccacaaucgcgaaucauacaugguccccuucaucccucucuaucgaaacggcgacuucuuuaucucaucaaaagaccuaggcuacgacuauuccuaccuacaagacuccgacccugacuccuuccaagacuacaucaaguccuaccuggaacaagccucacgcaucugguccuggcuucucggugcagcaaugguaggugccguacucaccgcccuacuagccggccuaguaucccuauuaugcagacacaaacgcaaacaacuaccagaagaaaaacaaccacuccucauggaaaaggaagacuaccacagccucuaucaaucacaccucuga

SEQ ID NO: 4529 - RNA, 1614 nt, Artificial Sequence
  AAC15468 variant
augucagccccgaaacuacucucccucggcugcauauucuucccgcuacuacuauuccaacaagcuagagcacaauucccccgccaaugcgccaccgucgaagcacuccgcucaggcaugugcugccccgaucuuucccccguaagcggccccggaaccgaucgaugcggcucuuccagcggccgagggcgcugcgaagccgucaccgcugacagccgaccacacucuccccaauacccccacgacggccgcgacgaccgcgaaguauggccccucagauucuucaaccgcacaugccauugcaacggcaacuucucaggccacaacugcggcaccugccgccccggcuggcgcggcgccgcaugcgaccaaagaguccuuaucguacguagaaaccuccucgaccucuccaaagaagaaaaaaaccacuucgugcgagcccucgacauggccaaacgaaccacccacccauuauucgucaucgccaccagacgcucagaagaaauccuuggcccagacggcaacacaccccaauucgaaaacauauccaucuacaacuacuucguauggacucacuacuacuccguaaaaaaaaccuuccucggaguaggucaagaauccuucggcgaaguagacuucucccacgaaggaccugcguuccuuacauggcaucgcuaccaccuccuucgucucgaaaaagauaugcaagaaaugcuacaagaaccaucauucucauugcccuacuggaacuucgccaccggcaaaaacgucugcgauauuugcacagaugaccucaugggcucccgauccaauuucgacuccacccucaucucgcccaacagugucuucucccaauggcgaguuguuugcgacucacuggaggacuacgacacccucggaacucucugcaacuccacagaagacggacccauacgaaggaaccccgccggcaacgucgcacgccccaugguccaacgacuacccgaaccccaagaugucgcacaaugccucgaggucggccucuucgacacccccccuuuuuacagcaacucaaccaacucauuccguaacacagucgaaggcuacucagaccccaccggaaaauacgaccccgccguccgaucacuccacaaccucgcucaccuauuccuaaacgggacuggaggacaaacccaccuaucccccaacgaccccaucuucguccugcuccacaccuucaccgacgccguuuucgacgaauggcugcgucgauacaaugccgacaucuccaccuucccccuagaaaacgcccccauaggacacaaccgccaauacaacauggucccauucuggccaccagucaccaacaccgaaauguucgucaccgcacccgauaaccucggcuacaccuacgaaauccaauggcccucccgcgaauuuuccgucccagaaauaauagcaaucgcaguugucggggcccuacuacuaguggcccucaucuucggcaccgccuccuaccucauccgcgcucgccgcuccauggacgaagcaaaccaaccccuccucacagaccaauaucaaugcuacgcagaagaauaugaaaaacuacaaaacccaaaccaauccgucgucuag

SEQ ID NO: 4530 - RNA, 1560 nt, Artificial Sequence
  AAA20870 variant
augucaccccuaugguggggcuuccuccucucuugccuaggcuguaaaauccuacccggagcccaaggccaauucccccgcgucugcaugacagucgacucccuagucaacaaagaaugcugcccccgacucggcgccgaauccgccaacgucugcgggucacaacagggacgcggacaaugcaccgaaguccgugcagacacccgccccuggucaggccccuacauccuccgaaaccaagacgaccgagaacucuggccccguaaauucuuccacagaacaugcaaaugcaccggcaauuucgccggcuacaacugcggcgacugcaaauucggauggaccggacccaacugcgaacguaagaaaccacccguaauccgacaaaacauucacucccucucaccccaagagcgagaacaauuccuaggagcccucgaccucgccaagaaacgcguacaccccgacuacguaauaaccacccaacacuggcucggucuacuaggcccuaacgguacccaaccccaauucgccaacugcuccguguacgacuucuucgucugguuacacuacuacucaguccgugacacccuacuaggccccggccgccccuacagagccauagacuucucacaccaaggccccgccuucgucacauggcaccgcuaccaccuccuaugccuagagcgcgaccuccaaagacucauugggaacgaguccuucgcccucccauacuggaacuucgccaccggacgaaacgaaugcgacgucugcaccgaccaacucuuuggcgcagcccgccccgacgaccccacacuuaucucccguaacucacgcuucuccuccugggaaaccgugugcgacucccuagacgacuacaaccaccuugucacccuuugcaacggcacuuacgaaggucuacuccgccguaaccaaaugggccgcaacucaaugaaacucccaacccucaaagacauccgcgacugccucucccuacaaaaauucgacaaucccccauucuuucaaaacuccacguucuccuuccgcaacgccuuagaaggcuucgauaaagcagacggcacacucgacucacaggucaugucccuccacaaccuaguccacucauuucucaacggcacuaacgcccuaccccacuccgccgcaaacgaccccaucuucguaguccuccacuccuuuacagacgccauauucgacgaauggaugaaacguuucaacccacccgccgacgccuggccacaagaacucgcuccaauaggccacaaccgcauguacaacaugguaccauuuuucccucccguuaccaacgaagaacuauuccucacuuccgaccaacucgguuacuccuaugccauugaccuaccagucucugucgaagaaacccccggcuggcccaccacccuccucgucguaaugggaacucucguagccuuaguaggccucuucguccuucucgcauuccuccaauaccggcgccuaagaaagggcuacaccccacucauggaaacccaccucuccuccaaacgauacacagaagaggcuuaa

SEQ ID NO: 4531 - RNA, 456 nt, Artificial Sequence
  CCDS7679.1 variant
augcgccgccuccuccucgucacaucccucguagucguccuccucugggaagccggcgccguccccgcccccaaaguacccaucaaaaugcaagucaaacacuggcccuccgaacaagaccccgaaaaagccuggggcgcccgcgucgucgaaccacccgaaaaagacgaccaacuagucguccucuuccccguccaaaaacccaaacuccuaaccaccgaagaaaaaccccgcggccaaggccgcggccccauccuucccggcaccaaagccuggauggaaaccgaagacacccucggccacguacucucccccgaacccgaccacgacucccucuaccaccccccccccgaagaagaccaaggcgaagaacgcccccgccuaugggucaugcccaaccaccaaguccuacucggccccgaagaagaccaagaccacaucuaccacccccaauaa

SEQ ID NO: 4532 - RNA, 525 nt, Artificial Sequence
  ACF47598 variant
auggucuccuacugggacaccggcguccuccucugcgcccuccucucuugccuccuccucaccggcuccuccuccggcucaaaacucaaagaccccgaacucucccucaaaggcacccaacacaucaugcaagccggacaaacccuacaccuccaaugccgcggcgaagccgcccacaaauggucccuccccgaaauggucucaaaagaauccgaacgucucuccaucaccaaauccgccugcggccgaaacggcaaacaauucugcuccacccucacccucaacacagcccaagcuaaccacaccggcuucuacuccugcaaauaccucgccguccccaccuccaaaaaaaaagaaaccgaauccgccaucuacaucuucaucucugacaccggacgccccuucgucgaaauguacuccgaaauccccgaaaucauccacaugaccgaaggccgcgaacuagucauccccugccgcgucaccucacccaacaucaccgucacccucaaaaaaaaaaaagccuaa

SEQ ID NO: 4533 - RNA, 750 nt, Artificial Sequence
  BAR92607 variant
auggguuccgacguccgugaccucaacgcccuccuccccgccguccccucccucggaggcggcggaggcugcgcacucccagucucaggcgccgcccaaugggccccaguccucgacuucgccccccccggcgccuccgcauacggcucccuaggcggccccgccccaccccccgcccccccccccccccccccuccccccccccacucauucaucaaacaagaaccauccuggggcggcgccgaaccccacgaagaacaaugccucuccgccuucacaguccacuucuccggccaauucacaggcaccgccggcgccugccgcuacggcccauucggcccccccccccccucccaagccuccuccggccaagcccgcauguuccccaacgcccccuaccuccccagcugccucgaaucccaacccgccauacgcaaccaaggcuacuccacagucaccuucgacggaacccccuccuacggccacacacccucccaccacgccgcccaauuccccaaccacuccuucaaacacgaagaccccaugggccaacaaggcucccucggcgaacaacaauacuccgucccaccacccgucuacggcugucacacccccacagacuccugcacaggcucacaagcccuccuacuccgaacccccuacucaucagacaaucucuaccaaaugacaucccaacuugaaugcaugacauggaaucaaaugaaccucggcgccacccucaaaggcuaa

SEQ ID NO: 4534 - RNA, 1350 nt, Artificial Sequence
  AAA61299 variant
augggcuccgauguccgagaccucaacgcccuucuacccgccguccccucccucggcggcggcggcgguugcgcccuccccgucucaggcgcugcccaaugggcccccguccucgacuucgccccacccggcgccucagcauacggcagucucggaggacccgcucccccucccgccccaccgccacccccaccaccaccuccccacucauucaucaaacaagaacccucuuggggaggcgccgaaccccacgaagaacaaugccuuuccgcuuucaccguccacuucucaggacaauucacuggaaccgcaggagccugccgcuacggccccuuuggcccaccaccacccucccaagccuccucaggucaggcccguauguuccccaacgcacccuaccuccccuccugccucgaaagucaacccgccauacgcaaccaaggcuacucuaccgucaccuucgacggcacgcccucuuacggacacacucccucacaucacgcggcacaauuccccaaccacagcuucaaacacgaagaccccaugggccagcaaggaucacucggcgaacaacaauacuccguacccccucccgucuacggcugccauacccccaccgacuccugcacaggaucccaagcccuccuucuccgcacccccuacagcuccgacaaccuauaccaaaugacaucccaacuagaaugcaugaccuggaaccaaaugaaccuuggcgcaacacucaaaggcgucgccgcuggcuccuccuccuccguuaaauggaccgaaggacaauccaaucacucaacagguuacgaauccgacaaccacacaacccccauccuaugcggcgcucaguaccgcauccacacacacggagucuuccguggcauccaagacguccgccgaguccccggcgucgcucccacccuggucagaucugccucagaaaccuccgaaaaacgccccuucaugugcgccuaccccgggugcaacaaacgcuacuucaaacucucccaccuccaaaugcacuccagaaaacacacaggcgaaaaacccuaccaaugcgacuucaaagacugcgaacgacgauucucacguagcgaccaacucaagcggcaccaacggcgccacaccggcgucaaacccuuccaaugcaaaaccugccaacgaaaauucucccgauccgaccaccuaaaaacccacacccgaacccacaccgguaaaacauccgaaaaacccuucuccugccgcuggcccucaugccaaaagaaauucgcgcgcucagacgaacucguacgacaccacaauaugcaccaacgcaacaugaccaaacuccaacucgcccucuaa

SEQ ID NO: 4535 - RNA, 279 nt, Artificial Sequence
  AAA63269 variant
augcaacgccgcggccaaccccucgaaaaccacgucgcccucauccacuggcaauccgccggcauccccgccuccaaaguccacaacuacugcaacaugaaaaaaucccgccucggccgcucccgcgccguccgcaucucccaaccccuccucuccccccgccgcugcccccuccaccucaccgaacgcggcgccggccuccuccaaccccaaccccaaggccccguccgcacccccggcccccccuccggcucccaccccgccgccgccgacaacuaa

SEQ ID NO: 4536 - RNA, 246 nt, Artificial Sequence
  AAP35763 variant
auggaaucccccaaaaaaaaaaaccaacaacucaaagucggcauccuccaccucggcucccgccaaaaaaaaauccgcauccaacuccgcucccaaugcgccaccuggaaagucaucugcaaauccugcaucucccaaacccccggcaucaaccucgaccucggcuccggcgucaaagucaaaaucauccccaaagaagaacacugcaaaaugcccgaagccggcgaagaacaaccccaagucuaa

SEQ ID NO: 4537 - DNA, 42 bp, Artificial Sequence
  5-UTR of human ribosomal protein Large 32 lacking the 5 terminal oligopyrimidine tract
ggcgctgcctacggaggtggcagccatctccttctcggcatc

SEQ ID NO: 4538 - RNA, 42 nt, Artificial Sequence
  5-UTR of human ribosomal protein Large 32 lacking the 5 terminal oligopyrimidine tract mRNA
ggcgcugccuacggagguggcagccaucuccuucucggcauc

SEQ ID NO: 4539 - DNA, 75 bp, Artificial Sequence
  5-UTR of human mitochondrial ATP synthase subunit alpha lacking the 5 terminal oligopyrimidine tract
gcggctcggccattttgtcccagtcagtccggaggctgcggctgcagaagtaccgcctgcggagtaactgcaaag

SEQ ID NO: 4540 - RNA, 75 nt, Artificial Sequence
  5-UTR of human mitochondrial ATP synthase subunit alpha lacking the 5 terminal oligopyrimidine tract mRNA
gcggcucggccauuuugucccagucaguccggaggcugcggcugcagaaguaccgccugcggaguaacugcaaag

SEQ ID NO: 4541 - DNA, 110 bp, Artificial Sequence
  3-UTR of Homo sapiens hemoglobin, alpha 1 (HBA1)
gctggagcctcggtggccatgcttcttgccccttgggcctccccccagcccctcctccccttcctgcacccgtacccccgtggtctttgaataaagtctgagtgggcggc

SEQ ID NO: 4542 - RNA, 110 nt, Artificial Sequence
  3-UTR of Homo sapiens hemoglobin, alpha 1 (HBA1) mRNA
gcuggagccucgguggccaugcuucuugccccuugggccuccccccagccccuccuccccuuccugcacccguacccccguggucuuugaauaaagucugagugggcggc

SEQ ID NO: 4543 - DNA, 108 bp, Artificial Sequence
  3-UTR of Homo sapiens hemoglobin, alpha 2 (HBA2)
gctggagcctcggtagccgttcctcctgcccgctgggcctcccaacgggccctcctcccctccttgcaccggcccttcctggtctttgaataaagtctgagtgggcag

SEQ ID NO: 4544 - RNA, 108 nt, Artificial Sequence
  3-UTR of Homo sapiens hemoglobin, alpha 2 (HBA2) mRNA
gcuggagccucgguagccguuccuccugcccgcugggccucccaacgggcccuccuccccuccuugcaccggcccuuccuggucuuugaauaaagucugagugggcag

SEQ ID NO: 4545 - DNA, 132 bp, Artificial Sequence
  3-UTR of Homo sapiens hemoglobin, beta (HBB)
gctcgctttcttgctgtccaatttctattaaaggttcctttgttccctaagtccaactactaaactgggggatattatgaagggccttgagcatctggattctgcctaataaaaaacatttattttcattgc

SEQ ID NO: 4546 - RNA, 132 nt, Artificial Sequence
  3-UTR of Homo sapiens hemoglobin, beta (HBB) mRNA
gcucgcuuucuugcuguccaauuucuauuaaagguuccuuuguucccuaaguccaacuacuaaacugggggauauuaugaagggccuugagcaucuggauucugccuaauaaaaaacauuuauuuucauugc

SEQ ID NO: 4547 - DNA, 44 bp, Artificial Sequence
  Center, alpha-complex-binding portion of the 3UTR of an alpha-globin gene (muag)
gcccgatgggcctcccaacgggccctcctcccctccttgcaccg

SEQ ID NO: 4548 - RNA, 44 nt, Artificial Sequence
  Center, alpha-complex-binding portion of the 3UTR of an alpha-globin gene (muag) mRNA
gcccgaugggccucccaacgggcccuccuccccuccuugcaccg

SEQ ID NO: 4549 - DNA, 186 bp, Artificial Sequence
  3-UTR of human albumin
catcacatttaaaagcatctcagcctaccatgagaataagagaaagaaaatgaagatcaaaagcttattcatctgtttttctttttcgttggtgtaaagccaacaccctgtctaaaaaacataaatttctttaatcattttgcctcttttctctgtgcttcaattaataaaaaatggaaagaatct

SEQ ID NO: 4550 - RNA, 186 nt, Artificial Sequence
  3-UTR of human albumin mRNA
caucacauuuaaaagcaucucagccuaccaugagaauaagagaaagaaaaugaagaucaaaagcuuauucaucuguuuuucuuuuucguugguguaaagccaacacccugucuaaaaaacauaaauuucuuuaaucauuuugccucuuuucucugugcuucaauuaauaaaaaauggaaagaaucu

SEQ ID NO: 4551 - DNA, 186 bp, Artificial Sequence
  3-UTR albumin7
catcacatttaaaagcatctcagcctaccatgagaataagagaaagaaaatgaagatcaatagcttattcatctctttttctttttcgttggtgtaaagccaacaccctgtctaaaaaacataaatttctttaatcattttgcctcttttctctgtgcttcaattaataaaaaatggaaagaacct

SEQ ID NO: 4552 - RNA, 186 nt, Artificial Sequence
  3-UTR albumin7 mRNA
caucacauuuaaaagcaucucagccuaccaugagaauaagagaaagaaaaugaagaucaauagcuuauucaucucuuuuucuuuuucguugguguaaagccaacacccugucuaaaaaacauaaauuucuuuaaucauuuugccucuuuucucugugcuucaauuaauaaaaaauggaaagaaccu

SEQ ID NO: 4553 - DNA, 187 bp, Artificial Sequence
  3-UTR ALB7
gcatcacatttaaaagcatctcagcctaccatgagaataagagaaagaaaatgaagatcaatagcttattcatctctttttctttttcgttggtgtaaagccaacaccctgtctaaaaaacataaatttctttaatcattttgcctcttttctctgtgcttcaattaataaaaaatggaaagaacct

SEQ ID NO: 4554 - RNA, 187 nt, Artificial Sequence
  3-UTR ALB7 mRNA
gcaucacauuuaaaagcaucucagccuaccaugagaauaagagaaagaaaaugaagaucaauagcuuauucaucucuuuuucuuuuucguugguguaaagccaacacccugucuaaaaaacauaaauuucuuuaaucauuuugccucuuuucucugugcuucaauuaauaaaaaauggaaagaaccu

SEQ ID NO: 4555 - DNA, 24 bp, Artificial Sequence
  histone stem-loop sequence
caaaggctcttttcagagccacca

SEQ ID NO: 4556 - RNA, 24 nt, Artificial Sequence
  histone stem-loop sequence mRNA
caaaggcucuuuucagagccacca

SEQ ID NO: 4557 - DNA, 13 bp, Artificial Sequence
  Kozak
gccgccaccatgg

SEQ ID NO: 4558 - protein, 261 aa, Artificial Sequence
  P07288-1
MWVPVVFLTLSVTWIGAAPLILSRIVGGWECEKHSQPWQVLVASRGRAVCGGVLVHPQWVLTAAHCIRNKSVILLGRHSLFHPEDTGQVFQVSHSFPHPLYDMSLLKNRFLRPGDDSSHDLMLLRLSEPAELTDAVKVMDLPTQEPALGTTCYASGWGSIEPEEFLTPKKLQCVDLHVISNDVCAQVHPQKVTKFMLCAGRWTGGKSTCSGDSGGPLVCNGVLQGITSWGSEPCALPERPSLYTKVVHYRKWIKDTIVANP

SEQ ID NO: 4559 - protein, 238 aa, Artificial Sequence
  P07288-2
MWVPVVFLTLSVTWIGAAPLILSRIVGGWECEKHSQPWQVLVASRGRAVCGGVLVHPQWVLTAAHCIRNKSVILLGRHSLFHPEDTGQVFQVSHSFPHPLYDMSLLKNRFLRPGDDSSHDLMLLRLSEPAELTDAVKVMDLPTQEPALGTTCYASGWGSIEPEEFLTPKKLQCVDLHVISNDVCAQVHPQKVTKFMLCAGRWTGGKSTCSWVILITELTMPALPMVLHGSLVPWRGGV

SEQ ID NO: 4560 - protein, 218 aa, Artificial Sequence
  P07288-3
MWVPVVFLTLSVTWIGAAPLILSRIVGGWECEKHSQPWQVLVASRGRAVCGGVLVHPQWVLTAAHCIRKPGDDSSHDLMLLRLSEPAELTDAVKVMDLPTQEPALGTTCYASGWGSIEPEEFLTPKKLQCVDLHVISNDVCAQVHPQKVTKFMLCAGRWTGGKSTCSGDSGGPLVCNGVLQGITSWGSEPCALPERPSLYTKVVHYRKWIKDTIVANP

SEQ ID NO: 4561 - RNA, 786 nt, Artificial Sequence
  P07288-1
augugggucccgguugucuuccucacccuguccgugacguggauuggugcugcaccccucauccugucucggauugugggaggcugggagugcgagaagcauucccaacccuggcaggugcuuguggccucucguggcagggcagucugcggcgguguucuggugcacccccaguggguccucacagcugcccacugcaucaggaacaaaagcgugaucuugcugggucggcacagccuguuucauccugaagacacaggccagguauuucaggucagccacagcuucccacacccgcucuacgauaugagccuccugaagaaucgauuccucaggccaggugaugacuccagccacgaccucaugcugcuccgccugucagagccugccgagcucacggaugcugugaaggucauggaccugcccacccaggagccagcacuggggaccaccugcuacgccucaggcuggggcagcauugaaccagaggaguucuugaccccaaagaaacuucaguguguggaccuccauguuauuuccaaugacgugugugcgcaaguucacccucagaaggugaccaaguucaugcugugugcuggacgcuggacagggggcaaaagcaccugcucgggugauucugggggcccacuugucuguaauggugugcuucaagguaucacgucauggggcagugaaccaugugcccugcccgaaaggccuucccuguacaccaagguggugcauuaccggaaguggaucaaggacaccaucguggccaaccccuga

SEQ ID NO: 4562 - RNA, 717 nt, Artificial Sequence
  P07288-2
augugggucccgguugucuuccucacccuguccgugacguggauuggugcugcaccccucauccugucucggauugugggaggcugggagugcgagaagcauucccaacccuggcaggugcuuguggccucucguggcagggcagucugcggcgguguucuggugcacccccaguggguccucacagcugcccacugcaucaggaacaaaagcgugaucuugcugggucggcacagccuguuucauccugaagacacaggccagguauuucaggucagccacagcuucccacacccgcucuacgauaugagccuccugaagaaucgauuccucaggccaggugaugacuccagccacgaccucaugcugcuccgccugucagagccugccgagcucacggaugcugugaaggucauggaccugcccacccaggagccagcacuggggaccaccugcuacgccucaggcuggggcagcauugaaccagaggaguucuugaccccaaagaaacuucaguguguggaccuccauguuauuuccaaugacgugugugcgcaaguucacccucagaaggugaccaaguucaugcugugugcuggacgcuggacagggggcaaaagcaccugcucgugggucauucugaucaccgaacugaccaugccagcccugccgaugguccuccauggcucccuagugcccuggagaggaggugucuag

SEQ ID NO: 4563 - RNA, 657 nt, Artificial Sequence
  P07288-3
augugggucccgguugucuuccucacccuguccgugacguggauuggugcugcaccccucauccugucucggauugugggaggcugggagugcgagaagcauucccaacccuggcaggugcuuguggccucucguggcagggcagucugcggcgguguucuggugcacccccaguggguccucacagcugcccacugcaucaggaagccaggugaugacuccagccacgaccucaugcugcuccgccugucagagccugccgagcucacggaugcugugaaggucauggaccugcccacccaggagccagcacuggggaccaccugcuacgccucaggcuggggcagcauugaaccagaggaguucuugaccccaaagaaacuucaguguguggaccuccauguuauuuccaaugacgugugugcgcaaguucacccucagaaggugaccaaguucaugcugugugcuggacgcuggacagggggcaaaagcaccugcucgggugauucugggggcccacuugucuguaauggugugcuucaagguaucacgucauggggcagugaaccaugugcccugcccgaaaggccuucccuguacaccaagguggugcauuaccggaaguggaucaaggacaccaucguggccaaccccuga

SEQ ID NO: 4564 - RNA, 786 nt, Artificial Sequence
  P07288-1 variant
augugggugcccgucguguuccugacccucagcgugaccuggaucggcgccgccccgcugauccugucccgcaucgucgggggcugggagugcgagaagcacagccagcccuggcagguccucguggcgucccgggggcgcgccgugugcggcggggugcuggugcacccccaguggguccugacggccgcccacugcauccggaacaagagcgugauccuccugggccgccacucccuguuccaccccgaggacaccggccagguguuccaggucagccacuccuucccgcacccccucuacgacaugagccugcugaagaaccgguuccuccgccccggggacgacuccagccacgaccugaugcugcuccggcuguccgagcccgccgagcugaccgacgcggugaaggugauggaccucccgacccaggagcccgcccugggcacgaccugcuacgccagcggguggggcuccaucgagcccgaggaguuccugacccccaagaagcuccagugcgucgaccugcacgugaucagcaacgacgugugcgcccagguccacccgcagaaggugaccaaguucaugcugugcgcggggcgcuggacgggcggcaaguccacgugcagcggggacuccggcgggccccucgugugcaacggcguccugcagggcaucaccagcuggggguccgagcccugcgcccugcccgagcggccgagccucuacaccaagguggugcacuaccgcaaguggaucaaggacaccaucgucgccaaccccuga

SEQ ID NO: 4565 - RNA, 717 nt, Artificial Sequence
  P07288-2 variant
augugggugcccgucguguuccugacccucagcgugaccuggaucggcgccgccccgcugauccugucccgcaucgucgggggcugggagugcgagaagcacagccagcccuggcagguccucguggcgucccgggggcgcgccgugugcggcggggugcuggugcacccccaguggguccugaccgccgcccacugcauccggaacaagagcgugauccuccugggccgccacucccuguuccaccccgaggacaccggccagguguuccaggucagccacuccuucccgcacccccucuacgacaugagccugcugaagaaccgguuccuccgccccggggacgacuccagccacgaccugaugcugcuccggcuguccgagcccgccgagcugaccgacgcggugaaggugauggaccucccgacccaggagcccgcccugggcacgaccugcuacgccagcggguggggcuccaucgagcccgaggaguuccugacccccaagaagcuccagugcgucgaccugcacgugaucagcaacgacgugugcgcccagguccacccgcagaaggugaccaaguucaugcugugcgcggggcgcuggacgggcggcaaguccacgugcagcugggugauccucaucaccgagcugaccaugcccgcccugcccaugguccuccacgggucccuggugcccuggcggggcgggguguga

SEQ ID NO: 4566 - RNA, 657 nt, Artificial Sequence
  P07288-3 variant
augugggugcccgucguguuccugacccucagcgugaccuggaucggcgccgccccgcugauccugucccgcaucgucgggggcugggagugcgagaagcacagccagcccuggcagguccucguggcgucccgggggcgcgccgugugcggcggggugcuggugcacccccaguggguccugacggccgcccacugcauccggaagcccggcgacgacagcucccacgaccucaugcugcugcgccucagcgagccggccgagcugaccgacgcggugaaggugauggaccugcccacccaggagcccgcccucggcaccacgugcuacgccuccggguggggcagcaucgagcccgaggaguuccugaccccgaagaagcugcagugcgucgaccuccacgugaucuccaacgacgugugcgcccagguccacccccagaaggugaccaaguucaugcugugcgcggggcgguggaccggcggcaagagcacgugcuccggggacagcggcgggccccuggugugcaacggcguccuccaggggaucaccuccuggggcagcgagcccugcgcccugccggagcgccccucccuguacaccaagguggugcacuaccggaaguggaucaaggacaccaucgucgccaaccccuga

SEQ ID NO: 4567 - RNA, 786 nt, Artificial Sequence
  P07288-1 variant
auguggguccccgucgucuuccucacccucuccgucaccuggaucggcgccgccccccucauccucucccgcaucgucggcggcugggagugcgagaagcacucccagcccuggcagguccucgucgccucccgcggccgcgccgucugcggcggcguccucguccacccccaguggguccucaccgccgcccacugcauccgcaacaaguccgucauccuccucggccgccacucccucuuccaccccgaggacaccggccaggucuuccaggucucccacuccuucccccacccccucuacgacaugucccuccucaagaaccgcuuccuccgccccggcgacgacuccucccacgaccucaugcuccuccgccucuccgagcccgccgagcucaccgacgccgucaaggucauggaccuccccacccaggagcccgcccucggcaccaccugcuacgccuccggcuggggcuccaucgagcccgaggaguuccucacccccaagaagcuccagugcgucgaccuccacgucaucuccaacgacgucugcgcccagguccacccccagaaggucaccaaguucaugcucugcgccggccgcuggaccggcggcaaguccaccugcuccggcgacuccggcggcccccucgucugcaacggcguccuccagggcaucaccuccuggggcuccgagcccugcgcccuccccgagcgccccucccucuacaccaaggucguccacuaccgcaaguggaucaaggacaccaucgucgccaaccccuga

SEQ ID NO: 4568 - RNA, 717 nt, Artificial Sequence
  P07288-2 variant
auguggguccccgucgucuuccucacccucuccgucaccuggaucggcgccgccccccucauccucucccgcaucgucggcggcugggagugcgagaagcacucccagcccuggcagguccucgucgccucccgcggccgcgccgucugcggcggcguccucguccacccccaguggguccucaccgccgcccacugcauccgcaacaaguccgucauccuccucggccgccacucccucuuccaccccgaggacaccggccaggucuuccaggucucccacuccuucccccacccccucuacgacaugucccuccucaagaaccgcuuccuccgccccggcgacgacuccucccacgaccucaugcuccuccgccucuccgagcccgccgagcucaccgacgccgucaaggucauggaccuccccacccaggagcccgcccucggcaccaccugcuacgccuccggcuggggcuccaucgagcccgaggaguuccucacccccaagaagcuccagugcgucgaccuccacgucaucuccaacgacgucugcgcccagguccacccccagaaggucaccaaguucaugcucugcgccggccgcuggaccggcggcaaguccaccugcuccugggucauccucaucaccgagcucaccaugcccgcccuccccaugguccuccacggcucccucguccccuggcgcggcggcgucuga

SEQ ID NO: 4569 - RNA, 657 nt, Artificial Sequence
  P07288-3 variant
auguggguccccgucgucuuccucacccucuccgucaccuggaucggcgccgccccccucauccucucccgcaucgucggcggcugggagugcgagaagcacucccagcccuggcagguccucgucgccucccgcggccgcgccgucugcggcggcguccucguccacccccaguggguccucaccgccgcccacugcauccgcaagcccggcgacgacuccucccacgaccucaugcuccuccgccucuccgagcccgccgagcucaccgacgccgucaaggucauggaccuccccacccaggagcccgcccucggcaccaccugcuacgccuccggcuggggcuccaucgagcccgaggaguuccucacccccaagaagcuccagugcgucgaccuccacgucaucuccaacgacgucugcgcccagguccacccccagaaggucaccaaguucaugcucugcgccggccgcuggaccggcggcaaguccaccugcuccggcgacuccggcggcccccucgucugcaacggcguccuccagggcaucaccuccuggggcuccgagcccugcgcccuccccgagcgccccucccucuacaccaaggucguccacuaccgcaaguggaucaaggacaccaucgucgccaaccccuga

SEQ ID NO: 4570 - RNA, 786 nt, Artificial Sequence
  P07288-1 variant
augugggugcccgucguuuuccugacccucagcgugacauggaucggcgccgcuccucuuauucuguccagaauaguagggggaugggagugcgaaaagcacucucagccauggcaaguguuggucgcaucaaggggucgggccguguguggcgggguuuuagugcauccgcaguggguccugacugcggcucacugcauccgcaacaaaagugugauucuacucggacgacauagccuguuucaccccgaggacacgggccagguauuccagguuucccauucuuuuccucacccacuuuacgauaugucgcuguugaagaaucguuuccucagacccggugacgauucaagccacgaccugaugcugcucagguuaagugaaccugccgagcugaccgaugcagugaaagucauggaccuuccaacacaagaacccgccuuggggacuaccuguuaugcuuccggauggggcucuaucgagccugaggaauuucugacaccaaagaaacuacagugcguggaucuccaugugauuagcaacgacgucugugcacagguucacccgcagaaggugaccaaguucaugcugugcgccggccgguggacugggggaaaauccacauguucaggugauaguggcgggccccuuguaugcaauggagugcugcaaggcaucaccagcugggguucugagccuugugcuuugccagaacgccccucccucuacacgaaggucgugcauuauagaaaauggauaaaggacacuaucguugccaacccuuga

SEQ ID NO: 4571 - RNA, 717 nt, Artificial Sequence
  P07288-2 variant
augugggugcccgucguuuuccugacccucagcgugacauggaucggcgccgcuccucuuauucuguccagaauaguagggggaugggagugcgaaaagcacucucagccauggcaaguguuggucgcaucaaggggucgggccguguguggcgggguuuuagugcauccgcaguggguccugacugcggcucacugcauccgcaacaaaagugugauucuacucggacgacauagccuguuucaccccgaggacacgggccagguauuccagguuucccauucuuuuccucacccacuuuacgauaugucgcuguugaagaaucguuuccucagacccggugacgauucaagccacgaccugaugcugcucagguuaagugaaccugccgagcugaccgaugcagugaaagucauggaccuuccaacacaagaacccgccuuggggacuaccuguuaugcuuccggauggggcucuaucgagccugaggaauuucugacaccaaagaaacuacagugcguggaucuccaugugauuagcaacgacgucugugcacagguucacccgcagaaggugaccaaguucaugcugugcgccggccgguggacugggggaaaauccacauguucauggguaauccuuauaaccgagcugacgaugcccgcuuugccuauggugcuccaugguagucuggucccauggcgcggcgggguguga

SEQ ID NO: 4572 - RNA, 657 nt, Artificial Sequence
  P07288-3 variant
augugggugcccgucguuuuccugacccucagcgugacauggaucggcgccgcuccucuuauucuguccagaauaguagggggaugggagugcgaaaagcacucucagccauggcaaguguuggucgcaucaaggggucgggccguguguggcgggguuuuagugcauccgcaguggguccugacugcggcucacugcauccgcaaacccggagacgauaguagccaugaccuaaugcuccugcgacuuuccgagccugccgaacugacggaugcagugaagguaauggacuugccaacccaggagcccgcccucggcacaacuuguuacgcuucugguugggggucgauugaaccugaggaguuucugacccccaaaaagcugcagugcguugaucuccacgugaucucaaacgacgucugugcacaagugcauccacagaaagugacaaaguucauguuaugcgccggacguuggaccggcggcaagagcacuuguaguggggauuccggagguccucuggucugcaauggcguucuucaggggauuacaucuuggggaagcgaaccaugugcuuugccggagagacccucccuguauaccaaagugguacacuacaggaaguggaucaaagacacgauaguggccaacccuuga

SEQ ID NO: 4573 - RNA, 786 nt, Artificial Sequence
  P07288-1 variant
augugggugcccgugguguuccugacccugagcgugaccuggaucggcgccgccccccugauccugagcagaaucgugggcggcugggagugcgagaagcacagccagcccuggcaggugcugguggccagcagaggcagagccgugugcggcggcgugcuggugcacccccagugggugcugaccgccgcccacugcaucagaaacaagagcgugauccugcugggcagacacagccuguuccaccccgaggacaccggccagguguuccaggugagccacagcuucccccacccccuguacgacaugagccugcugaagaacagauuccugagacccggcgacgacagcagccacgaccugaugcugcugagacugagcgagcccgccgagcugaccgacgccgugaaggugauggaccugcccacccaggagcccgcccugggcaccaccugcuacgccagcggcuggggcagcaucgagcccgaggaguuccugacccccaagaagcugcagugcguggaccugcacgugaucagcaacgacgugugcgcccaggugcacccccagaaggugaccaaguucaugcugugcgccggcagauggaccggcggcaagagcaccugcagcggcgacagcggcggcccccuggugugcaacggcgugcugcagggcaucaccagcuggggcagcgagcccugcgcccugcccgagagacccagccuguacaccaagguggugcacuacagaaaguggaucaaggacaccaucguggccaaccccuga

SEQ ID NO: 4574 - RNA, 717 nt, Artificial Sequence
  P07288-2 variant
augugggugcccgugguguuccugacccugagcgugaccuggaucggcgccgccccccugauccugagcagaaucgugggcggcugggagugcgagaagcacagccagcccuggcaggugcugguggccagcagaggcagagccgugugcggcggcgugcuggugcacccccagugggugcugaccgccgcccacugcaucagaaacaagagcgugauccugcugggcagacacagccuguuccaccccgaggacaccggccagguguuccaggugagccacagcuucccccacccccuguacgacaugagccugcugaagaacagauuccugagacccggcgacgacagcagccacgaccugaugcugcugagacugagcgagcccgccgagcugaccgacgccgugaaggugauggaccugcccacccaggagcccgcccugggcaccaccugcuacgccagcggcuggggcagcaucgagcccgaggaguuccugacccccaagaagcugcagugcguggaccugcacgugaucagcaacgacgugugcgcccaggugcacccccagaaggugaccaaguucaugcugugcgccggcagauggaccggcggcaagagcaccugcagcugggugauccugaucaccgagcugaccaugcccgcccugcccauggugcugcacggcagccuggugcccuggagaggcggcguguga

SEQ ID NO: 4575 - RNA, 657 nt, Artificial Sequence
  P07288-3 variant
augugggugcccgugguguuccugacccugagcgugaccuggaucggcgccgccccccugauccugagcagaaucgugggcggcugggagugcgagaagcacagccagcccuggcaggugcugguggccagcagaggcagagccgugugcggcggcgugcuggugcacccccagugggugcugaccgccgcccacugcaucagaaagcccggcgacgacagcagccacgaccugaugcugcugagacugagcgagcccgccgagcugaccgacgccgugaaggugauggaccugcccacccaggagcccgcccugggcaccaccugcuacgccagcggcuggggcagcaucgagcccgaggaguuccugacccccaagaagcugcagugcguggaccugcacgugaucagcaacgacgugugcgcccaggugcacccccagaaggugaccaaguucaugcugugcgccggcagauggaccggcggcaagagcaccugcagcggcgacagcggcggcccccuggugugcaacggcgugcugcagggcaucaccagcuggggcagcgagcccugcgcccugcccgagagacccagccuguacaccaagguggugcacuacagaaaguggaucaaggacaccaucguggccaaccccuga

SEQ ID NO: 4576 - RNA, 786 nt, Artificial Sequence
  P07288-1 variant
augugggugcccgucguuuuccugacccucagcgugacauggaucggcgccgcuccucugauucuuuccagaaucgucgggggaugggagugcgaaaagcacucucagccguggcaagugcugguggccagccggggccgcgcgguuugugggggagugcucguccauccccagugggugcugacggcugcccacugcauuagaaacaaauccguuauccuucugggccggcauucucucuuucacccugaggacaccggacagguguuccaggucagccauuccuuuccccacccucuguacgauaugucucugcucaagaaucgcuuccugagacccggggacgauagcucccacgaccuuaugcugcuccggcugagcgaaccugccgagcuuacagaugcugugaaagugauggaccugccgacccaagaacccgcccucggcacaaccuguuaugcuucuggcuggggguccauugagccugaggaauuucugacacccaagaaacugcagugcgucgaucuccauguuaucagcaacgacgugugugcccaggugcacccucagaaggucaccaaguucaugcugugcgcgggacgcuggacgggcgggaaaucuaccuguuccggagauagcggcgggccccuugugugcaauggaguucugcaaggcaucacaucuuggggcuccgagccgugugcccucccugaaagacccagccuguacaccaaggugguccauuaucggaaauggauuaaggacacaaucguggcuaacccuuga

SEQ ID NO: 4577 - RNA, 717 nt, Artificial Sequence
  P07288-2 variant
augugggugcccgucguuuuccugacccucagcgugacauggaucggcgccgcuccucugauucuuuccagaaucgucgggggaugggagugcgaaaagcacucucagccguggcaagugcugguggccagccggggccgcgcgguuugugggggagugcucguccauccccagugggugcugacggcugcccacugcauuagaaacaaauccguuauccuucugggccggcauucucucuuucacccugaggacaccggacagguguuccaggucagccauuccuuuccccacccucuguacgauaugucucugcucaagaaucgcuuccugagacccggggacgauagcucccacgaccuuaugcugcuccggcugagcgaaccugccgagcuuacagaugcugugaaagugauggaccugccgacccaagaacccgcccucggcacaaccuguuaugcuucuggcuggggguccauugagccugaggaauuucugacacccaagaaacugcagugcgucgaucuccauguuaucagcaacgacgugugugcccaggugcacccucagaaggucaccaaguucaugcugugcgcgggacgcuggacgggcgggaaaucuaccuguuccugggugauccuuauuacagagcugaccaugcccgcccucccgaugguucugcauggaagccuugugccuuggagaggcggggucuga

SEQ ID NO: 4578 - RNA, 657 nt, Artificial Sequence
  P07288-3 variant
augugggugcccgucguuuuccugacccucagcgugacauggaucggcgccgcuccucugauucuuuccagaaucgucgggggaugggagugcgaaaagcacucucagccguggcaagugcugguggccagccggggccgcgcgguuugugggggagugcucguccauccccagugggugcugacggcugcccacugcauuagaaaaccuggcgacgauuccucucaugaccuuaugcugcuccggcugagcgagcccgccgaacugaccgaugcuguuaaggugauggaccucccuacacaggagcccgcccuggggaccacauguuacgcuuccggauggggcucuaucgaaccugaggaguuucuuaccccgaaaaagcugcagugcgucgaucuccacgugauuagcaacgacgugugugcccaaguccauccccagaaaguuacaaaguucaugcugugcgcgggccgcuggaccgggggaaaguccacguguagcggcgauucugggggaccucuugugugcaauggcgugcugcaggggaucaccuccuggggaagcgaacccugugcccucccugagagacccucucuguauacaaaagucgugcacuaccggaaguggaucaaagacaccauuguugcuaacccguga

SEQ ID NO: 4579 - RNA, 786 nt, Artificial Sequence
  P07288-1 variant
auguggguaccaguuguauucuuaacacuaucaguaacauggauaggagcagcacccuuaaucuuaucaagaaucguaggcggaugggaaugugaaaaacauucacaaccauggcaaguauuaguagcaucacgaggaagagcaguauguggaggaguauuaguucauccacaauggguacuaacagcagcacauuguauaagaaacaaaucaguaauauuacuaggaagacacucauuauuccauccagaagauacaggacaaguauuucaaguaucacauagcuuuccacauccuuuauacgauaugucacuauuaaaaaauagauuucuaagaccaggagacgauucaucacacgauuuaauguuauuaagguuaucagaaccagcagaauuaacagacgccguaaaaguaauggauuuaccaacacaagaaccagcauuagguacaacauguuacgcaucaggauggggaucaauagaaccagaagaauuccucacaccaaaaaaacuacaaugcguagacuuacacguaauaucaaacgauguaugugcacaaguacauccacaaaaaguaacaaaauucauguuaugugcaggaagauggacuggaggaaaaucaacaugcucaggagauucuggagguccacuaguaugcaauggaguauuacaaggaauaacaucauggggaucagaaccaugugcacuaccagaaagaccaucauuauauacaaaaguaguacauuaucgaaaauggaucaaagacacaauaguugcaaauccauaa

SEQ ID NO: 4580 - RNA, 717 nt, Artificial Sequence
  P07288-2 variant
auguggguaccaguaguauuccuuaccuuaucuguaacauggauaggagcagcaccauuaauauuaucaagaauaguaggaggaugggaaugcgaaaaacauucacaaccauggcaaguacuaguagcaucaagaggaagagcaguaugcggaggaguauuaguacauccacaauggguacuaacagcagcacacuguauaagaaauaaaagcguaauauuacucggaagacacucauuauuucauccagaagacacaggacaaguauuucaaguaucacauucauuuccacauccauuauacgauaugucacuauuaaaaaauagauuuuuaagaccaggugacgauagcucacaugaucuaaugcuauuaagauuaucagaaccagcagaauuaacagaugcaguaaaaguaauggauuuaccaacacaagaaccagcauuaggaacaacauguuaugcaagugguuggggaagcauagaaccagaagaauucuuaacaccaaaaaaacuacaaugcguagacuuacacguaauaucaaacgauguaugcgcacaaguacauccacaaaaaguaacaaaauucaugcuaugcgcaggacgcuggacaggaggaaaaucaacauguaguuggguaauauuaauaacagaauuaacaaugccagcauuaccaaugguacuacacggcucacuaguaccauggagaggaggaguauaa

SEQ ID NO: 4581 - RNA, 657 nt, Artificial Sequence
  P07288-3 variant
auguggguaccaguaguauuuuuaacauuaucaguaacauggauaggagcagcaccauuaauacuaucaagaauaguaggaggaugggaaugugaaaaacacucacaaccauggcaaguauuaguagcaagcagagguagagcaguaugcggaggaguauuaguacauccacaaugggucuuaacugcagcucauuguauaagaaaaccaggagacgauaguagucaugauuuaauguuauuaagauuaagugaaccagcagaacuaacagaugcaguaaaaguaauggauuuaccaacacaagaaccagcauuaggaacaacauguuaugcaucaggauggggaaguauagaaccagaagaauucuuaacaccaaaaaaacuacaauguguagauuuacauguaauaaguaaugauguaugugcacaaguacauccacaaaaaguaacaaaauuuaugcuaugugcaggacgauggacaggaggcaaaaguacauguucgggugauaguggaggaccauuaguauguaaugguguauuacaaggaauaacaucauggggaucugaaccaugugcuuuaccagaaagaccaaguuuauauacaaaaguaguacauuauagaaaauggauaaaagauacaauaguagcaaauccauaa

SEQ ID NO: 4582 - RNA, 786 nt, Artificial Sequence
  P07288-1 variant
auguggguccccgucgucuuccucacccucucugucacauggaucggcgccgccccccucauacucuccagaaucgucggcggcugggaaugcgaaaaacauucccaacccuggcaaguacucgucgcaucccgcggccgcgccgucugcggcggcguccuaguccacccccaauggguccucaccgccgcccacugcauccgaaacaaauccgucauccuacuaggccgccacucccuauuccaccccgaagauacaggacaagucuuccaagucucccacuccuucccccacccccuauacgacaugucccuacuaaaaaaccgcuuccuacgccccggcgacgacuccucacacgaccucaugcuccuccgccucucagaacccgccgaacucaccgacgccgucaaaguaauggaccuccccacccaagaacccgcacuaggaaccaccugcuacgccuccggcuggggauccaucgaacccgaagaauuccucaccccaaaaaaacuacaaugcguagaccuacacgucauauccaacgacgucugcgcccaaguccacccccaaaaagucaccaaauucaugcucugcgccggccgauggaccggcggcaaauccaccugcucaggagacuccggcggcccccucgucugcaacggaguccuacaaggcaucaccuccuggggcuccgaacccugcgcccuccccgaacgcccaucccucuacaccaaagucguccacuaccgcaaauggaucaaagacacaauagucgccaaccccuaa

SEQ ID NO: 4583 - RNA, 717 nt, Artificial Sequence
  P07288-2 variant
augugggucccagucgucuuccuaacccucucaguaaccuggauaggcgccgccccccucauccuaucccgcaucguaggcggcugggaaugcgaaaaacacucccaacccuggcaaguccucgucgcaucccgaggccgcgcugucugcggcggaguccucguccacccccaauggguacucacagccgcacacugcauccgcaacaaauccgucauccuccucggccgccacucccucuuccaccccgaagacacaggccaagucuuccaagucucccacucauucccccacccccuauacgacaugucccuccucaaaaaccgauuccuccgccccggcgacgacuccucacacgaccucaugcuacuccgccuauccgaacccgccgaacucaccgacgccguaaaagucauggaccuccccacccaagaacccgcccucggcacaaccugcuacgccuccggcuggggcucaauagaacccgaagaauuccucacccccaaaaaacuccaaugcgucgaccuccacgucaucuccaacgacgucugcgcccaaguccacccccaaaaagucacuaaauucaugcucugcgccggccgcuggaccggcggcaaauccaccugcuccuggguaauccuaaucaccgaacuaaccaugccagccuuaccuaugguccuccacggcucacucguccccuggcgcggcggcgucuaa

SEQ ID NO: 4584 - RNA, 657 nt, Artificial Sequence
  P07288-3 variant
auguggguccccgucgucuuccucacccucuccgucaccuggaucggcgcagccccccucauccucucccgcaucgucggcggcugggaaugcgaaaaacacucccaaccauggcaaguccucgucgccucccgaggccgcgccgucugcggcggcguucuaguacacccccaauggguccuaaccgcagcccacugcauccgcaaacccggagacgacuccucccacgaccucaugcuccuacgccuaucagaacccgcagaacucaccgacgccgucaaaguaauggaccucccaacccaagaacccgcccucggcaccaccugcuacgccuccggcuggggcuccaucgaacccgaagaauuccuaacccccaaaaaacuccaaugcgucgaccuacacguaaucucaaacgacgucugcgcccaaguccacccccaaaaaguaaccaaauucaugcuaugcgccggacgcuggaccggcggaaaaucaaccugcuccggcgacagcggaggcccccucgucugcaacggcguacuccaaggcaucaccucauggggcagcgaacccugcgcccuacccgaacgccccucacucuacacaaaaguaguccacuaccgcaaauggaucaaagacaccauaguagccaaccccuaa

SEQ ID NO: 4585 - RNA, 1122 nt, Artificial Sequence
  Q9UBF1 variant
augcccccggugcccggcguccccuuccggaacguggacaacgacagccccaccuccguggagcuggaggacugggucgacgcccagcacccgaccgacgaggaggaggaggaggccagcuccgcgagcuccacgcucuaccugguguucagccccuccagcuucuccaccagcuccagccugauccucgggggccccgaggaggaggaggugcccuccggggucaucccgaaccugaccgagagcauccccuccagccccccgcagggcccgccccaggggcccucccagagcccccuguccagcugcugcagcuccuucagcugguccagcuucuccgaggagagcuccagccagaagggcgaggacaccggcacgugccaggggcucccggacuccgagagcuccuucaccuacacccuggacgagaagguggccgagcugguggaguuccuccugcugaaguacgaggccgaggagcccgucaccgaggccgagaugcucaugaucgugaucaaguacaaggacuacuuccccgugauccugaagcgcgcccgggaguucauggagcugcucuucggccuggcgcugaucgaggucgggcccgaccacuucugcguguucgccaacacggugggccucaccgacgaggggagcgacgacgagggcaugccggagaacucccugcugaucaucauccucagcgucaucuucaucaagggcaacugcgccuccgaggaggugaucugggaggugcugaacgccgucgggguguacgcgggccgcgagcacuucguguacggggagccccgggagcugcucaccaaggucugggugcagggccacuaccuggaguaccgcgaggugccgcacagcucccccccguacuacgaguuccuguggggcccccgggcccacagcgaguccaucaagaagaagguccucgaguuccuggccaagcugaacaacaccgugcccagcagcuuccccuccugguacaaggacgcccucaaggacgucgaggagcgcgugcaggccacgaucgacaccgcggacgacgccaccgugauggccagcgagucccugagcgucauguccagcaacguguccuucagcgaguga

SEQ ID NO: 4586 - RNA, 543 nt, Artificial Sequence
  P78358 variant
augcaggccgagggccgcggcaccggcggcucgaccggcgacgccgacgggcccggcggcccgggcaucccggacggcccgggcgggaacgcgggcggcccgggcgaggccggcgccaccggcgggcggggcccgcggggcgccggcgccgcccgggcgagcggccccggcgggggcgccccgcggggcccgcacggcggcgccgccagcggccugaacgggugcugccggugcggcgcccgcggcccggagagccggcuccuggaguucuaccuggccaugccguucgcgaccccgauggaggccgagcuggcccggcggagccuggcccaggacgccccgccgcugcccgugccgggcgugcuccugaaggaguucacggugagcggcaacauccugaccauccggcugaccgccgcggaccaccggcagcugcagcugucgaucagcagcugccuccagcagcugagccugcugauguggaucacccagugcuuccugccgguguuccuggcccagccgcccagcggccagcgccgguga

SEQ ID NO: 4587 - RNA, 945 nt, Artificial Sequence
  P43357 variant
augccccuggagcagcgcucgcagcacugcaagccggaggagggccucgaggcccggggcgaggcccugggccuggugggcgcgcaggccccggccaccgaggagcaggaggccgccagcagcagcagcacccugguggaggugacccugggcgaggugccggccgcggagagcccggacccgccccagucgccgcagggggccagcagccugccgaccacgaugaacuacccgcucuggagccagagcuacgaggacagcucgaaccaggaggaggagggcccgagcaccuucccggaccuggagagcgaguuccaggccgcccugagccggaagguggccgagcugguccacuuccugcugcucaaguaccgggcccgggagcccgugaccaaggcggagaugcugggcagcguggugggcaacuggcaguacuucuucccggugaucuucagcaaggccucgagcagccugcagcugguguucggcaucgagcugauggaggucgacccgaucggccaccuguacaucuucgccaccugccucgggcugagcuacgacggccugcugggcgacaaccagaucaugccgaaggccggccugcugaucaucgugcucgccaucaucgcccgggagggcgacugcgcgccggaggagaagaucugggaggagcugagcgugcuggagguguucgagggccgcgaggacagcauccugggggacccgaagaagcugcugacccagcacuucgugcaggagaacuaccucgaguaccggcaggugcccggcucggacccggccugcuacgaguuccuguggggcccgcgggcccuggucgagaccagcuacgugaaggugcugcaccacauggugaagaucagcggcggcccgcacaucagcuacccgccgcugcacgagugggugcugcgggagggcgaggaguga

SEQ ID NO: 4588 - RNA, 945 nt, Artificial Sequence
  P43356 variant
augccccuggagcagcggagccagcacugcaagccggaggagggccucgaggcccgcggggaggcccugggccuggugggggcgcaggcccccgccaccgaggagcagcagaccgccuccagcuccagcacgcucgucgaggugacccugggcgaggugcccgccgcggacucccccagcccgccccacuccccccagggggccagcuccuucagcaccaccaucaacuacacgcuguggcggcaguccgacgagggcagcuccaaccaggaggaggagggcccccgcauguucccggaccucgagagcgaguuccaggccgccaucucccggaagauggucgagcuggugcacuuccugcuccugaaguaccgcgcgcgggagcccgugaccaaggccgagaugcuggagagcguccuccgcaacugccaggacuucuuccccgugaucuucuccaaggccagcgaguaccugcagcugguguucgggaucgaggucguggaggugguccccaucucccaccucuacauccuggugaccugccugggccucagcuacgacgggcugcugggcgacaaccaggugaugccgaagaccgggcuccugaucaucguccuggccaucaucgccaucgagggcgacugcgcgcccgaggagaagaucugggaggagcucagcaugcuggagguguucgagggccgggaggacuccguguucgcccacccccgcaagcugcucaugcaggaccugguccaggagaacuaccuggaguaccggcaggugcccgggagcgacccggccugcuacgaguuccucuggggcccccgcgcccugaucgagacguccuacgugaagguccugcaccacacccucaagaucgggggcgagccccacaucagcuacccgccgcugcacgagcgggcccugcgcgagggcgaggaguga

SEQ ID NO: 4589 - RNA, 2253 nt, Artificial Sequence
  Q04609 variant
auguggaaccugcuccacgagaccgacagcgccguggccaccgcgcggcgcccccgguggcugugcgccggcgcccugguccucgccgggggcuucuuccugcugggguuccucuucggcugguucaucaaguccagcaacgaggccacgaacaucaccccgaagcacaacaugaaggcguuccuggacgagcugaaggccgagaacaucaagaaguuccucuacaacuucacccagaucccccaccuggccgggaccgagcagaacuuccagcuggccaagcagauccagucccaguggaaggaguucggccucgacagcguggagcuggcgcacuacgacgugcugcucuccuaccccaacaagacgcaccccaacuacaucagcaucaucaacgaggacggcaacgagaucuucaacaccucccuguucgagccgcccccccccggguacgagaacgucagcgacaucgugccgcccuucuccgccuucagcccccagggcaugcccgagggggaccugguguacgucaacuacgcccgcaccgaggacuucuucaagcucgagcgggacaugaagaucaacugcuccggcaagaucgugaucgcccgcuacgggaagguguuccggggcaacaaggucaagaacgcccagcuggcgggcgccaagggggugauccuguacagcgacccggccgacuacuucgcccccggcgugaaguccuaccccgacggguggaaccuccccggcggcgggguccagcgcggcaacauccugaaccugaacggggccggcgacccgcucacccccggguaccccgcgaacgaguacgccuaccggcgcggcaucgccgaggccgugggccugcccagcaucccggugcaccccaucggguacuacgacgcccagaagcugcucgagaagaugggcggguccgcgccccccgacagcuccuggcggggcagccugaaggucccguacaacguggggcccggcuucacgggcaacuucuccacccagaaggugaagaugcacauccacagcaccaacgaggucacccgcaucuacaacgugaucgggacgcugcggggcgccguggagcccgaccgcuacgucauccucgggggccaccgggacagcuggguguucgggggcaucgacccccaguccggcgccgccgugguccacgagaucgugcgcagcuucgggacccugaagaaggagggcuggcggccgcgccggaccauccuguucgccuccugggacgcggaggaguucgggcuccugggcagcaccgagugggccgaggagaacucccgccugcuccaggagcggggcgucgccuacaucaacgccgacagcuccaucgaggggaacuacacgcugcgcguggacugcaccccgcugauguacagccucgugcacaaccugaccaaggagcugaagucccccgacgagggcuucgaggggaagagccucuacgaguccuggaccaagaagagcccgucccccgaguucagcggcaugccccggaucuccaagcuggggagcggcaacgacuucgaggucuucuuccagcggcugggcaucgcguccgggcgcgcccgguacacgaagaacugggagaccaacaaguucagcggcuacccccucuaccacuccguguacgagaccuacgagcugguggagaaguucuacgacccgauguucaaguaccaccugaccgucgcccaggugcgcgggggcaugguguucgagcuggccaacagcaucguccuccccuucgacugccgggacuacgccguggugcugcgcaaguacgcggacaagaucuacagcaucuccaugaagcacccccaggagaugaagacguacagcgucuccuucgacagccuguucuccgccgugaagaacuucaccgagaucgccagcaaguucuccgagcggcuccaggacuucgacaagagcaaccccaucgugcugcgcaugaugaacgaccagcugauguuccucgagcgggccuucaucgacccgcuggggcugcccgaccgccccuucuaccggcacgucaucuacgcccccuccagccacaacaaguacgcgggcgaguccuucccggggaucuacgacgcccucuucgacaucgagagcaagguggaccccuccaaggccuggggcgaggugaagcgccagaucuacgucgccgccuucaccgugcaggcggccgccgagacccugagcgagguggccuga

SEQ ID NO: 4590 - RNA, 786 nt, Artificial Sequence
  P07288-1 variant
augugggugcccgucguguuccugacccucagcgugaccuggaucggcgccgccccgcugauccugucccggaucgucgggggcugggagugcgagaagcacagccagcccuggcaggugcucguggcgucccgcgggcgggccgucugcggcggggugcuggugcacccccaguggguccugacggccgcccacugcauccgcaacaagagcgugauccuccugggccggcacucccuguuccaccccgaggacaccggccagguguuccaggucagccacuccuucccgcacccccucuacgacaugagccugcugaagaaccgcuuccuccggcccggggacgacuccagccacgaccugaugcugcuccgccuguccgagcccgccgagcugaccgacgcggugaaggugauggaccucccgacccaggagcccgcccugggcacgaccugcuacgccagcggguggggcuccaucgagcccgaggaguuccugacccccaagaagcuccagugcgucgaccugcacgugaucagcaacgacgugugcgcccagguccacccgcagaaggugaccaaguucaugcugugcgcggggcgguggacgggcggcaaguccaccugcagcggggacuccggcgggccccucgugugcaacggcguccugcagggcaucaccagcuggggguccgagcccugcgcccugcccgagcgcccgagccucuacaccaagguggugcacuaccggaaguggaucaaggacacgaucgucgccaaccccuga

SEQ ID NO: 4591 - RNA, 646 nt, Artificial Sequence
  P40967 variant
augggggcgcugccuacggagguggcagccaucuccuucucggcaucaagcuuaccaugaaggugccccggaaccaggacuggcucggcgggggcgggagcggcgggggcggcuccgggggcgggggcagcuccguguacgacuucuucguguggcugggcgggggcgggagcggcgggggcggcuccgggggcgggggcagcacggcccccgacaaccugggcuacaugggcgggggcgggagcggcgggggcggcuccgggggcgggggcagcgccaaguucguggccgccuggacccugaaggcggccgccugaggacuagugcaucacauuuaaaagcaucucagccuaccaugagaauaagagaaagaaaaugaagaucaauagcuuauucaucucuuuuucuuuuucguugguguaaagccaacacccugucuaaaaaacauaaauuucuuuaaucauuuugccucuuuucucugugcuucaauuaauaaaaaauggaaagaaccuagaucuaaaaaaaaaaaaaaaaaaaaaaaaaaaaaaaaaaaaaaaaaaaaaaaaaaaaaaaaaaaaaaaaugcaucccccccccccccccccccccccccccccccaaaggcucuuuucagagccaccagaauu
